United States Patent Application Publication US 2025/0295137 A1 - sequence listing, part 2

SEQ ID NO: 2 - DNA, 1934542 bp, Latilactobacillus curvatus
  source 1..1934542: mol_type = genomic DNA
aagctgtttcaacacagtagatctttgaaaactgaacaaagtttcgacaaaccaaatgtgtagggtcgcccttcggggcacaaaacatatttgcaaagtcaatttcgctagcaaataaattaagtaacaaaacaagagctacaaacttttaatcgagagtttgatcctggctcaggacgaacgctggcggcgtgcctaatacatgcaagtcgaacgcactttcgttagattgaagaagcttgcttctgattgataacatttgagtgagtggcggacgggtgagtaacacgtgggtaacctgccctaaagtgggggataacatttggaaacagatgctaataccgcataaaacctagcaccgcatggtgcaaggttgaaagatggtttcggctatcactttaggatggacccgcggtgcattagttagttggtgaggtaaaggctcaccaagaccgtgatgcatagccgacctgagagggtaatcggccacactgggactgagacacggcccagactcctacgggaggcagcagtagggaatcttccacaatggacgaaagtctgatggagcaacgccgcgtgagtgaagaaggttttcggatcgtaaaactctgttgttggagaagaacgtatttgatagtaactgatcaggtagtgacggtatccaaccagaaagccacggctaactacgtgccagcagccgcggtaatacgtaggtggcaagcgttgtccggatttattgggcgtaaagcgagcgcaggcggtttcttaagtctgatgtgaaagccttcggctcaaccgaagaagtgcatcggaaactgggaaacttgagtgcagaagaggacagtggaactccatgtgtagcggtgaaatgcgtagatatatggaagaacaccagtggcgaaggcggctgtctggtctgtaactgacgctgaggctcgaaagcatgggtagcaaacaggattagataccctggtagtccatgccgtaaacgatgagtgctaggtgttggagggtttccgcccttcagtgccgcagctaacgcattaagcactccgcctggggagtacgaccgcaaggttgaaactcaaaggaattgacgggggcccgcacaagcggtggagcatgtggtttaattcgaagcaacgcgaagaaccttaccaggtcttgacatcctttgaccactctagagatagagctttcccttcggggacaaagtgacaggtggtgcatggttgtcgtcagctcgtgtcgtgagatgttgggttaagtcccgcaacgagcgcaacccttattactagttgccagcatttagttgggcactctagtgagactgccggtgacaaaccggaggaaggtggggacgacgtcaaatcatcatgccccttatgacctgggctacacacgtgctacaatggatggtacaacgagtcgcgagaccgcgaggtttagctaatctcttaaaaccattctcagttcggattgtaggctgcaactcgcctacatgaagccggaatcgctagtaatcgcggatcagcatgccgcggtgaatacgttcccgggccttgtacacaccgcccgtcacaccatgagagtttgtaacacccaaagccggtgaggtaaccttcgggagccagccgtctaaggtgggacagatgattagggtgaagtcgtaacaaggtagccgtaggagaacctgcggctggatcacctcctttctaaggaataatacggaaaaccttgtacatttgcgaagtcgaaactttgtttagttttgagaggtctactctcaaactttgttctttgaaaactggataataagtaatatattagttttaaaagccgagaaaacattgcgttttaaagagttttttaatagaaatatgaattagttcatatcgctaaactcaaataataaccctttaccgtaggtaaagttaggttaagttataaagggcgcacggtggatgccttggcactaggagccgatgaaggacggtactaacaccgatatgcttcggggagctgtaagtaagctttgatccggagatttccgaatgggggaacccaatacctttagtcgggtattatcattaagtgaatacatagcttaatgaaggtagacgcggggaactgaaacatctaagtacctgcaggaagagaaagaaaaatcgattccctaagtagcggcgagcgaacggggaagagcccaaaccaagaagcttgcttcttggggttgtaggacagaacattggagttaccaagttaagttgtaatcgaatcagctgggaagctgagtcaaagagtgtgataaccacgtagattaaacaacttaacctccgttctggatcctgagtacggcggaacacgtgaaattccgtcggaatccgggaggaccatctcccaaggctaaatactccctagtgaccgatagtgaaccagtaccgtgagggaaaggtgaaaagcaccccggaaggggagtgaaatagatcctgaaaccgtgtgcctacaattagtcaaagctcgttaatgagtgatggcgtgccttttgtagaatgaaccggcgagttacgtttatatgcgaggttaaagtgaaaagctggagccgtagcgaaagcgagtctgaaatgggcgagtgagtatatagatgtagacccgaaaccaagtgacctacccatgtccaggttgaaggtgtggtaaaacacactggaggaccgaacccacgtcagttgaaaatggcggggatgaggtgtgggtagcggtgaaattccaatcgaacttggagatagctggttctctccgaaatagctttagggctagcctcggaatattggatcatggaggtagagcactgtttggactaggggcccgtcatgggttactgaattcagataaactccgaataccattgatttagttccgggagtcagactgcgagtgataagatccgtagtcgaaagggaaacagcccagatcaccagttaaggtcccaaaatttatgttaagtggaaaaggatgtggcggtgcacagacaactaggatgttggctcagaagcagccaccatttaaagagtgcgtaatagctcactagtcgagtgccgctgcgccgaaaatgtaccggggctaaacataataccgaaactgtgggtggacacgtaagtgtccgcggtaggagagcgttctaagggcgatgaagctagatcgtaaggactagtggagcgcttagaagtgagaatgccggcatgagtagcgaaagatcagtgagaatctgatccaccgtatgactaaggtttcctggggaaggctcgtcctcccagggttagtcgggacctaaggcgaggccgaaaggcgtagtcgatggccaacaggttgagattcctgtactagtttattttgtttgaacgatggagggacgcaggaagctaaggaatgcacacgactggaaatgtgtgtctaagcaacaagtcttgagttgagtgaaatgcttgattctttaaggacaagttgtgatggggagcgaaattaagtagcgaagttcctgatgttacactgccaagaaaagcttctagtgagaaataaactacccgtaccgtaaaccgacacaggtggtcgaggagaatatcctaaggtgagcgagtgaactctcgttaaggaactcggcaaaatgaccccgtaacttcgggagaaggggtgctgaccgtcaggtcagccgcagtgaataggcccaaacaactgtttatcaaaaacacaggtctctgcaaaatcgaaagatgacgtataggggctgacgcctgcccggtgctggaaggttaagaggatgagttagcgtaagcgaagcccagaattgaagccccagtaaacggcggccgtaactataacggtcctaaggtagcgaaattccttgtcgggtaagttccgacccgcacgaaaggcgtaatgatttgggcactgtctcaacgagagactcggtgaaattataatacccgtgaagatgcgggttacccgcgacaggacggaaagaccccatggagctttactgtagcttgatattgagtgtttgtacagtttgtacaggataggtaggagccgtagaaatcggaacgctagtttcgatggaggcgttggtgggatactaccctaactgtatgaccactctaacccgcgccacttagcgtggcgggagacagtgtcaggtgggcagtttgactggggcggtcgcctcctaaagtgtaacggaggcgctcaaaggttctctcagaatggttggaaatcattcgtagagtgtaaaggtataagagagcttgactgtgagattgacaaatcgagcagggacgaaagtcggacttagtgatccggtggttccgtatggaagggccatcgctcaacggataaaagctaccctggggataacaggcttatctcccccaagagtccacatcgacggggaggtttggcacctcgatgtcggctcatcgcatcctggggctgtagtcggtcccaagggttgggctgttcgcccattaaagcggtacgcgagctgggttcagaacgtcgtgagacagttcggtccctatccgtcgcgggcgcaggaaatttgagaggagctgtccttagtacgagaggaccgggatggacatacctctggtgtaccagttgtgccgccaggcgcatcgctgggtagctatgtatggacgggataaacgctgaaagcatctaagtgtgaagcccccctcgagatgagatttcccattcctttatggaagtaagacccctgaaagatgatcaggtagataggctaggagtggaagtacagcgatgtatggagcggactagtactaatcggtcgaggacttaaccaaaggtgcaatgttaggcttttgaaatgaaatattacttattatgcagttttgagagaacgaagttcttctcagtgcgcaagcacaaaatagtgtggtggcgatagcaagaaggatacacctgttcccatgtcgaacacagaagttaagcttcttagcgccgatagtagttggtgggaaactacctgcgaggataggacgttgccgcgctttttcattccggtttagctcagttggtagagcgcatgactgttaatcatgatgtcgtcagttcgagcctgacaaccggagtcattgaacggttgagaattttcaatcgttttttatttcggcccgttggtcaagtggttaagacaccgccctttcacggcggtatcatgggttcaaatcccgtacgggtcatcaataatgccggcttagctcagttggtagagcatcggtatcgtaaaccgagggtcacaggttcgactcctgcagccggcatcaatagcatgtttctaccaagtgctaatcgggataatcagcattgtactgacgttttgttagtataatgcttttttaatattcaatttgattgaaaagcaaccactaaaatagccagttacgaaaatcgtaactggctattacttattgttcatttgcccattgccataatagaatctgagtgcgtccagtcattttttcattggctaagatcgtctgtgcttcagcacgattaacccacagggtacttaaggcttcatccacttcaagtgtacggtctgtttgtttagcttgatcaagagtacagattgctagactaacggcgccatcagtaaggcctggtgaggaataacttggcgcaaagcaatgttcaacctcaataagagagtaacctgtttccgccattaactcacgggaaatggcttgtttaatcgactcagttggttcaactaaaccggcgggattaccatagacaaaatcattaaggggctgtctaaattgtttagtcagtaagacctgtgagtgattttgattgtagcagaacattgcaaccgctgaggcattagctggtcgttttaaagtctcgatggttaagttagagtcacgactgacaaaatgataaggcattaaatcgccgtgttcattttgatacattgcttcgtagtaagttagccaacgatcaggtcgtaatggaataagagatgttagtgtaaaagggttcatcggaatcagctcgctttctattagttcattgtactactgtttaaaggcaacaaaccagttttctaagaacatgttaggtatcatgagcattttctcatttaagaataagcattagtcattttgaatcataaaataacttattttaatgaaaaaatcagtgcaaacaatgcagttaatgttgaaaaaagaattgatttaagattaaaataagattataatagcccttatagattctaagcgaatgataagagacttcttgtatagatgagtcgattcaatttaataactatcaaattcttagtttccgtaataataaagttttaaagtggggtattacaatggaagagaaacaagaaaaaacattctttgggcaaccgcatgggctatcaacactgttcttcactgaaatgtgggaacggtttagctactacgggatgcgtgcaattctattattctatatgtattttgctttagataagggtggtcttggctttgacaagacgactgcaatgtctgtgatggcaatctatggttcgatggtttacctagccagcgttgttggtggttggttaagtgatcggatctgggggagcttcaaaaccgtcttcatcggtggtgtcttgattatgttaggccatattgccttagcaatgccgatgggtgcgacagctttatttatttcaattgctttgattgttgcagggactgggttattaaaaccaaacgtttctgaaatggttggtagtttgtatagtgaaaatgatcgtcgccgtgatgctggtttcagtatgttcgtcttcgggattaacttgggctcatttgtcgctccaattcttgttggggctgtcggtcaaaaaattgattttcacttaggcttctcattagccgctgtcgggatgttctttggtttaatccaatactaccgcggtcgttctcaattcagtaaagaaaattcaaaacctaatgatccaattgcgccagaagaattatcaagcgttattcgtaaaattgtgattggtgttgtggtcgtcgttgccgtagtattaggtatgcaatttacaggcaacttaaacattgataacattgtcttgatgatttcaatcattgcgattgcattaccaattgtgtacttctcacggatgttgggcagcaagaaagtgactaagaaggaacgttcacgcgttatagcttatattccactctttattgcagctgctatcttctggggaattgaagaatctggctccgttgtcctagctttatttgcagaagatcggacaattctaaacattggtgggcatagcttagctgcatcaaatttccaatcattgaatccactatttattatgcttctaacgccattctttgtatggttatggagtgcttggaagaaacaaccatctgcacctggtaaatttgctgttggtttaatcttcgctggtttatcatacatgtttatggcacttcctggattattacacggcaccgctggccgagttagcccattctggttaatcggttcatggttcatcgttgaaattgctgaaatgttaatttcaccaattgggttgtcaattacaacaaaattagcgccaaaggcattccaatcacaaatgatgagtatgtggttcttagcagatgctgcgggccaagcaattaatgcacagcttgtgcgtttatattcaccacaaacagaaattagatatttcttagggattgggattgtgagtgccatcttcgggatcgtcttaatcttcttcgttaaaccaattcataagttaatggaaggcgttaactaaatattagaaaaaatcttgattatttatgcaataatcaagattttttttgcattttggggttgatttttctgtcagaattttgtaaactaatatagttgaatcgatgagatgaaacgtatggaggagtagcgaagtggctaaacgcggcggactgtaaatccgctccttcgggttcggtggttcgaatccactctcctccacttgattgggctatggccaagcggtaaggcaacaggttttgatcctgtcatgcgctggttcgaatccagctagcccaatactttaaagacatcttgctaagatgtctttttttgtgtcctggattgactttcctccgctcgttcggtatccttggataaataaaaaaaggggtggcagaatgaaaattggatttattggtgtcggtaacatggcacaagcaatgattaaaggcttagtgaaagctaatcaagtcgcaacaacggatattttagtgcatggcggacatccggcgaactatgcggattttgtagctgaacaacggattacagctgttgcggataacaattcagtggttgaacaagccgacatcgtttttttagcggtaaaaccatatattgtgccacaggttttagcagaaacaaatgcagcctttaaagcacatcaaccattgatggtttcaatggcagcaggtttatcacttgataaattagcagaacaatctgctgcagatttaccaattctacgcatcatgccaaatgttaacgtggccaatcgcgcgggaattacagctgttgttgggaatgaacaagtcaatgcagaccaattggctcgtgtgaaagatgtccttgcacaactggggggcgtggttgaaatcggcgaaaaagatttcacaactttcagtgcgcttgccggtagttcaccagcatttgtttacctattcattgattcaatggcgcgggccggcgttaaacacggtttaacaaagaaagccgcaactgaaattgcagcccaagctgttttagggagtgcccaaaacgtgcttatgagtgatgattcaccttgggacttagtggatcaagtttcatcaccaggtggcacaaccgtcgccggcttattagcaatggaagaagccggcttaatgacagcagtggttaaaggcatcgacgcaacaattgcgaaggatttagaaagccaaaaatagagtgcgctcaagcatgtaaaaagcgtaacctgatacaaatactgtattgggttacgcttttttatattattttgtaaaatggaccatctcatgacagaattggtgggtgagtaagctactttctggtgggacaggatttgcgccgttagtttcaagggcagtaataaacgcatcaatcattggcgcaaagccccgcgtttcaagcgtagacgtccagtcagctgcaacttgaatgcgactgtcttctgccgcttgtgttgtgtagcgcgttagattatcgacagtgaataacccgtgtggtgtctggagacttgcaatttcttgattggtaccactttgcatatttaaagtcgcgctgattaattggcgcggtgtttcaatggttaattgtgcgagttgcaaattgccgtttgcatcctgctgacagtatggacggattttgtaattggtacctagtgaatcagccaagaaaagcgccgtatcaatggtatgaatcatcaggtcataaatggcaaagggcgttggttggctcgttgccacgcgtgttttagtgatgttaatcagttgtttatcgggtaagtgatttaatttttgcaaaaatggggcaaaacggcggttgaagccgaccgttaagagccgttctttgctagccgcaagtttgtataattcggcgacttccagtggattttcacttaagggtttatcgacaaaaacgtgtaaaccatggagcagggcttgtttaacatattgatagtgggttgcagttggggtgtgaatgaaaactgcgtcgagtggttgttcgagtaatgtgtcaaatgataggcagccactttctaaatgatattgcgcttgaagctgcgctaatttagccggttggcgcgtacataagacccaatcgacccggtcttgcatctgcgccattacaggtaaatatgctttttgtgcaatgtttcctagtccaataacaccgatttttaacatcattaaactccttaatatgaatggataaatatagtatagcaaattaacaagaaaacggttcaaagtttagtcggaatcccttgtttttttggtctataccatttatactagaggtaatttaaagatagaggtggatggataatggcagtaaaagtattaaaacatgcggtaatctatacaggtgacgacgttatcgaagacggttatattcgtttcgatgataaaattttggcagtgggccccatgttcgactacaaggcacaagctggcgaagaaattcaagatgttaaaggcaagacaatcattcctggctttattgacgttcactgtcacggtggttatggttttgatgcaatggacggcgatgctgaccaaatcgacgaaatggcaactaagatgatgcaaaatgaaggggtcacaaccttatttgcaacaacgatgacgcaatcaaacgaaaacattgctaatgctatgcgcggtgttaaagcagcggctgaaaagaacccattaattcaaggtgttcatttggaaggcccattcatcgcaccaatcttcaagggtgctcaaccagaacaattcatcaaagatccagacgttgatttattggacgaatggaataagttatcaggtaaccgcgtgcgtttaattacttatgcaccagaagatcctggttcaaaagcattcgaagactactgtttagcacacaacatcgtgccttcagttggtcatagtaatgcaacgcgtgaacaaatgcttgaaagtaaagcaacgcacgttacccatttatacaatgcccaacgtgaattcaagcaccgcgaacctggtgtgacaggtcacgcaatgttagaagacaacatgtacgctgaattaatcgctgatggtttccatatcgtgcctgacatgattaaattagcttacgaacaaaaaggtgcagaacggatcgaccttgtgactgattcaatgcgggctaaagggattgctgaaggcgaaagcgaattaggcggtcaaaaagtcattgttaaagacaaacaagcacgcttagaagatggcactttagccggatcagtgttaacatatatcgatgccttcaagaacatccaaacattcacaggttgtgaaacgtttgaagccgttatgatgtcaagtgtcaaccaagccgaagaatttggcttaacacaaaaaggtaaattagaagaaggtcgggatgctgatttcaacatcttagaccatcagcaaaacttagtcgcaacttacagctttgggaacggctatcaacattaatatttaggagtgtgtcccatggaatcacctgtttatattcaaattcataatcaacttaaaaaggatattgaagccggcaagtggtcgattggagatcgaattccttcagaacgggagcttgctttaaatttcgaagtctcacgaatgacattacggcaagccgtacaaacattagttgacgaagggattttggaacggcggattggggctgggacttacgtcgctaatcggaaagtccaagaaaaaatgtccggcgtgaccagttttaccgatctaatgacggcccaaggtaagcagccatctagtaaaaccatttcgttccacattgccaacccatcacttagcgaagctgaaaagctccagttaaaagatggcgagcaggtgctccgcatggaacggattcgctatgccgacaatgtgcccatctgttttgaagtggcaaccgtgccacaaagcttagttgccgatttcagtaaagctgaaatcacgtcttccttctataaagcattagccgaaaaagggggctacgaaatgggcggtgcacaacaaaccgtctcagcccaactcgcctcagaacgaattgccgaatatctcgacattaagcgtaatggcccaatcttgaaattacgacaagtttccttcttatcaaacggcgaacctttcgaatatgtccgcacccaatatgtgggcgaacgatttgagttttatttggaaagataattaaaacgtcctgaaccgataaggttcaggacgttttttttgattaatagccaataaatgtttatatgattaataatgctgaacagactgtaaaaatattaaagtttatgttaatattctacgtggaagttaattaaggattctagaggggaaaaaatgaatagaaaactaacgaagttcttaattggatttacaatggtctcggcgacctttttgtttgctacaaacaatgttcaagctggacaagtgctaacgccagatgaaatgaaaacgcaactaaatagtcaagatacaaaagaagcaacacctataaaagagaaaaaagcgaagactgacgatattgggatgcctattgattcatctaaggttaaaaaggcgattatgcctaaagcaggttatccaagtgtcaataattatatatatcaacacaacccacgcttcttcaattttttctttgtcaactatccaagtgtcaataattatatatatcaacacaactacttacatccaaacattacgcaagatttgcatacattctcaatatttaattataaaacagatgataatcgtcctaacggagtggttgttcattatactgataaccctaataattatagtgctcggagtgaagcagactatgagattaatggtgggtggcaatcagcatttgttcatacctttattgatgctaggacaatattaaacattcatgatacagattatggtgcatggggtagtggggcagttggtaataaatattttgcccaatttgaaatggtaacggctcgtaacttcgaagattttgctaagacaacgagttactcagcgtggtacactgcttacttgttaaacaaatataatttaacgccatctttggcacagaatcataatggggttggtacaatctggtcacatcataatgttacacaatatcttggtggaacagaccatactgatccagatgcttactttgcaaaatatgggtatgacatgaatcaattttatgcattagtgcaacattattatgatcaaatgcctgcaaataaagcgagccttaacagtgttaatgtgtctgaaaatgaaattcatgtggtgggttggcatacagcacagcaaacagccaatcggccatatagctacctattcttattagatagtaagacacataaagaagtaaaacggtataaaataaatcgtgtaaatcgtcaagatgtgcataacatttatgaaaacattaccaattcattacattcaggatttaacaatacattgacattagataataatatgcataataggagttacgttcttatgtctcgctactcgtcagatcccaacggtaataccgacactgttgatttcacatttagaaatattattaaagtacctaagcaagaaaccagtgtagcaagtatggattcattaactgctgataagaagacattatcaatgtccggttggcacgcatcagtggattctagtcggtatccatacagttatttaattgtaattaatgctaagacaggccgtgaatataagcgctatgcaattaaccgtacgcaacgtgacgatgttcgacaagtttatccgaatattgccaatgcaggaaaaagtgggtttggtttgagtattccagtaacaaatgatatgcgcggtaatacgtataaagtaatttcacgttactcaagtacaccaaatggcgaaggagcatacgtagactattcgtttgataatcaggtaacagtaccagcaattgttaaacaaaatttagggagtattgacaccctaacggcaagtttcaataatgttcacatcagcggttggcaagcaaatgatgatgcacaaggccgtaatgttcacactttaattgtaatggatgctaatacacataaagaaattaaacggatgactatcgccaactcaccaagaaatgatgtagctgctgcttatcccgatctatataaggcggggctgagcggattttctgcagatatcccagttgacagtcaattacaaggcaagaatatttacttcattagtcgttattcagcaacggcaaatgctgatgctgattatgtggattatcaattcattaatcaaattggagttcctaagaaacaagttattgaaagtgctgcaagtatggatcaattgtctcgtgtaaataataccgtaataatgtcgggatggcatgctgctaatgcttcgattaataaaccgtatagttatttaattattatggataagacaacaaacaaagaaattcggcgttataaaattaatcgttctttaagaaatgatgtagctgctgtctatccaacattatacggctctaaaaacagtggatttggtttaacgtttaatatcgataacagtttggttaacaaaagaatatatgtgattagccgttattcagataatccttcaggtgagggaaatacggttgattacgtgtttgacaatgccttgaacatctaaaaaatattgccgaacgtcttaaccgtgtggataagatgttcggtttttatttgtaactaaaacgaaatagtgttttaagtaattgtattgtattattagtatgtctgaaaaaactaactaggagcgacttgtgaagtgaaaaaaattgttaagaatagtattttaatgagtacgattggtttaattggcttaacaacaaatcaacgagtatcagcggctgaacaaaaacaagagacagcccctgcattaatgagcagtaatgaaagtattatatcagcaagtagtcaaagttctaaagaacaaaagccatctaccgataattcaactgaatccggtgtaattaaaaatagtgaatcagcagcagaaacaaagaacaaggaagaagttactgtaaagcaaaataatgaaattggtcctggggtttatgatgcgcctaaagtaagtcaaagaagtacgccagcttcaatgaatttattacgaaatacctccagagcttcaatgaatttattacgaaatacctccagttttattagtagtattcatgatggtgcaatttcgtcatggcgcaagtatggtgtattaccctctgtttcaggtgcgcaggcaatcttggagagcggttgggggcaatcgactttagcaacgtatggtaataacttatttggaattaagggaacatacaatggtcagtacgtaacaatgcccactcaagaatatattaatggtcagtggattacagttaatgcgcaatttagaaaatacaatagttggaatgaaagtatcgaagatcatgggaactttttggcggtaaattcacgatatcataatttgttgtggaaaactaattatcgtgaggtaacgagtcttttgaaacaagacggttatgctacagcgcctaactatgatactttgttaaacagtttgattgagcagtatggattaacaagttgggatcgagaagtaacggataatgtcggtagccttgatcaattaactgcaaatagcaataatatccttgcgcttggttggcatgcaattaatgatgccaataatttaccgtacagttatttaattctaattgataccaatacaggaaaagaacataaaaggattgcaattaatcgtggtaggagagatgatgtagcaaatgcctatccgtctattaacacggcagcaatgagtggtattaatgccaacatcccagtagactcaggaatgtatggacatacctatagggttatatcgcgttatgcacaattaccaagcggtgaagggagtgcaaaagactttgatttcggtaatactgtaaaagttcctgcgccaactaagcaaaatttaggtagtttggataacgttaaagttaattcaaataaaatttcaatgaatggttggcatgcgagtgattatgcacaaggaaaaaatacgcattatctgattgtaatgaatgtcgatactaataaagaaattaagcgcttgaaagttaataattcattgagaaatgatgttcatagtgtatatcctaatgtgtataattctggtatgagtggttttagtgctgaattagcggtggataagagtttagaaggcaagaatttctacgttattagtcgctatacaagtaccacgaatggtaacagtgattatgttgactatcaatttcctaatgttgttaacgtaccacaaggcccaagtaatttaggaagtattgatcaacttatccaaaatggtaatatcctccatatttcgggatggcatatttctaagaacgttcaaggcttaaataataattttatcatcataatgaataaagcaaataataaagaaattggacgggttcgcattaataggattactcgaaatgatgtcgcagctgtctatccaactgttgataatgcggcgcagagtggcttcgatattaaagtttctgtcgatgctaaactgaagcagaagaatatttatttaatcagtcgttattccaatagtaatagtggagaaggccgatatgtggattatcaatttattaattcgttgaatattaaatgataaaagttgaaaaactttgtttatgtttaaaattgtagaaccctaatgagatacaagggatttgaaattttaagtgtaggcgaagtttttttatttggcaaattctataattaatccgaacagaaattaaaaagcccaaagcaatcacttacaatggtagtagctaattccaaccaatatagggagtgattactttgggtacatctactttatcacgttttcaacgtggcgcactagcacaactggtcaatgaggggaataaatcttaccaagtaatggctgacgccttaggcgtcgccaaagctacgattagctatgagttggaccgagttaaaccttatgatccagaattagctcagcaagatgcagatcgcaaaaggcggaattgcggtcgtcgttcgatgctgacggcagcattagcgactttaattaccaatcacttacgattaacctggtcaccagaaaccattgcggccgcttataacttgagcactgcgtcaatttataattggcttaatcgtggctggctccccttcaaattgactgatctacccaatcggaatgtccgccagcaccgagtgagcgaaaatcgtgggaaatttacaagtgggacttccatcgaacaacggccaacaactgttaatcaacggttagcttttggtcattgggaagtagatacggtgctttctagtcgaagtgagtcacgatcatgtctggttacattcgtagaacgtaagacccgacttctatgggccatcaaagcccctaatagaacggctaaggctctaaacaccgcctttggcaagtttatgggggccttcggtccccaagtaaaatccattactgttgatcatggtaaagagtttgccaattatcaggccttagaacaggattatcagatcaaagtttatttttgccatccatattcaccatgggagcgaggttccaatgaatactttaatagacggttacgctggttcttcccgaaaaagaccaattttagccaagtaacgactgatgagatcctagcagcacttgaactaattaatcaacgaccattaaaaatacatcatcaacagactgccattgaaagattccgggcttgttcggattaaacttgtaatttgccatttattaaaagatagtggactattaatggcaatattggggtatcatgttaattgttatattaaagaaagcccgagggggatatatatatatcatgagtaaaaatagaaaatctattttgagtgtaatgttattaataataatattattagctattcttgtaggattgtctgcctacgaggggctatatccgtttggtaataagttatggatacgagcagatagttatacgcagtatagtatcttttacaaatacttaagacagcaactagtacataacggaacacttctttatagttttaaattgggattaggaggcagtttctttacaataatgggttattacttaatgagcccactaagttttctcgttgtcctttttaaggatagtcaaattatgctttttatgacaattctaatcatatctaaaatcgttctttcaggtattacattttatttgtttatcaataaaagaataaaattagactatgtttatcgcttaggattgtccatagcgtatgctttgatgtcatttaatattatttatgcatttaatgtaatgtggcttgatagcataatattaataccaattgcgttaatgggtgttgatcatttgatcaataaaggtaagatatggctactaacaggcactttaacactgttattcatatctaatttctatatggcatatatggcaggtatcggtatttttatatatttcttagtagaattaatagtccttcaaaatagagtgaaatggaaatctggcattaagtttctaatttcggtaatacttagttttgggttatcagcgtggctaattttaccaattaattatgcattgaaatcgggacccaaaatacccttgcaagttggattcttgcaacgcaagcagagtatctggatagcattgtctgatctgtttagccataatacgcaattatttgatggcgctaatatatattgcggtatcctgatgttagttgctgtaatagctttttattttatacccaaaataaaaataagaataaaagtgatagtgagcgctttagagatttgtttcttaattagttatatttatgaatatccatatgtaatgtggcacggatttcaacaacccacagggtatggattcagatttagttttttaatcagtttaatgatgatattaatcactggttttgtgattaatatcggcttagaaaatgtactaaaaccattggtatatgcggtgctattatgcagcataatattgttaacgttgtataaaaagcaggtaatagataacgggatactaattatcaatagtgtaatgttagggttgcttactttaatgatattgattggctatattttctataaaaatataggaataaatataatcaagtggttaacgttagcccttattatgacagatagtattcaaaatatgcattttgttattagtcagttggatagcttacccggatacgtcgctaccgaaaaaaattggaaagaaaatgacagtcaaaatttaaagactgctttatcttatttaaagcaggaccgaacattctatcgaactgtagtaacgccaaatgcaatgctaaaccaaggaatgtacaataattttaacgggtttagttggtttaacacttttggatatcagcaattagctacaacgttatctcaatttggatatagtactactttggggaataaatcactggcatatcaagaaggaaatacgattgtggatagtttattagggctaaaatatagaatagcattgatgaatgattctatgacttctattggataccagaaggtgttcaatagtggaaactatgaagtgtatcagaataaaaatgctttaccgatcgcaattattaatgacaatctaaccattaatcaaccactcgaaggaaatgaactacagcggcagcttctcttttttaataaaaataaaagaagtgcaatcattcgaacaatagataatccaaattttactgttcataacgtaaaaataaagcaaaaaaataatggcattcagttgagcccatatggtaagaatgcttatattgagtatcggattgatatgccagctaattcagaacttctgactaagatagctgtaattgatggtgttaattcttatggtaaattagattttaaaactaaccagattatacgaaataattatcctaattttcataatgaaggtgtattgagtctttataagagttccaatcacaaaagtaatgcatttgttaaaatgcgcttaaaaggaaatgtaaatatcgcagaatctcctaaatttatactacttaatggagatgccctaacggagaatattgaaaagttacgaaaagaagctccaaaggttataaaaaagagtgagaatagtattgaattacaagtgaatgctaaacataaagagcctgtctttttttcgattccgtttgataaaagttggaaagcaactgtgaacgggaaatccgtgttacttgaggataatcatggatttatgcaagtaccagttgaatcaggaaagagcagtataaaactaagatatattccaaaaggtattaaagaaggtttcttaataacaagcgtgacagctttaatgttgatcctttttggaattaaacagcaactagaaaaaagagttagtagggaataggtaatgaacacagagagcagaataagattaaaatggattgatcgaaaaagactaagagagattatggctcttttaggaattagtatattggtagtacttcctttttttcttactagaggagtagttagaggtagtgagggtgaggattggacgtttcattttgctagaataagaagtttactgggatcattaaaggcgtatcagctgcctgtagaagttaattttttagaattttcggcacagggattgggagtcaattcaatgtatcctttcttttccttgtatctttttatttggccgctattattaccgataaaacttagattaaaagtatttatattcgctttgttatttaacatttgtgcttctgcaaatatttttggatttatcggggaattcaccaataacttgtggatcaagtcttcaattgcagttttatatttatttaataattatcacctagtactttcatataagagatttgctttaggagaactacttggctatacaatgtttccattggtggcgtggggaattgttaagatatggaaacgtcaaaaagttggaatacttttgcttgcgttaggtgtttcgctaattgctaattcacatattctatccttgttgtttttgattgtagtattaatattggctgaaatagttagattattaatgcagaagtttaattgggaagaagctcggtatatttgtattgcagcggctttgacaatcccgatgtctgcagttactatttataattttttagtgttaagtatgcataatcgatacttagcacctaatatttcggcacctctaaatgaatcttctatctttccgcaaacatatattgtggacttaaagcatacacttcatccattagcgcttacggatttaaatgcaagaacatggaatatagggaccctttttctaatattggcctttattgcaattatttatctaattgtaagaagaaaagataacgacggttattatgcatttgtaggaattatcggactcttactagtgattggtggattcgattttgtgaattgggattttacagaacaccttaaaatatttgagcctattaaagtaattcaatttttgggtagattattaatgttagcggctatattcttagtggtaccggttatgcgtatgatgattaaagtcaaggcgttgtgggcgaaatggctaataggtgttccaataataatctttctaattaatggtatgatgacaatttatagaactcagaatttttatcaggagatagtgccgactaatattttagaaagtgggtataataatcagctgcatactattgattattttccggctttttctggaccaaaaagcggtgtggactatgcggttaaagctgcgtatagtgatattaaaggaccgattatgtttggaaattcagtgccatcctttaatagtgcaacatatcatatgaggatcaaacacgtagttatgaataaatatttagtgacgccagtagcggcctataatagatttaactatcgggtgacaattgatggacagacagtaaaatggattcataaccaaacatacggaacaatcgcaattagttctaacgaattagtaaataaaaaaaaggctaagctttgtgttgttgcaaaaccattgaaaaatgagtggttagtaatgatcattgcgggcatagcaaatatggctgttatgttgaggttgattttggattttaaacggaaataggtacaacactgactagtgtcatgcaataataataagatggatactatgagtttaggaatcatggtattgaggccaaaaaagttggaggatttcacatggagaaaataactaaaaaaaaggaaatatgggcgattattttaattgttattttattaatagcgctaaatttatcgattaatttaacaggaaatgggatcacacccaatggtggcgatgataaggcgtttgctcaatttgttctaggaaaacactatctacaatttttacatagtcgatatacgggatggtcttctcgactagtaattgaatcggtattatcaacattaacgcacttaccaattctgtggcgattattaaacacattggcaatgtttactgttatctatatcccgtatctattgcttcttaaaggaactgatgatgatgagaatgctagtcgtctattgattagttttgggatgttcttcttattacctttcaatatgttctacgagacagggtggatggcaaccacaaccaattacctatgggttttagctgccggtttattagcgatgctaccttccttagctcaatatttaggaatagacattaaacataaaaaaataatttcagttgttgctttcttagccttaatctatgctgttaatcaagaacaaatggtaattatcctattattgggtaattcattgttattgtacgtaacaagaggaaataaaaaggcactggggagattggcatttcaattcgtagttactgtattgtctttgattatgattgttttagcaccaggaaatagcgttagaaaagtcaaagaaattcattggttaccattatttccaactttgtcaccctttaaaaaaattgagttaggtatttctagtacattaggtcacttctttttttcatttgatgtgcttgcgacaatacttgtgattttactttttgcgttttatataaatcagaaggggagatataaaataccgcgtacagttttctatattccggtactgttcagcgtgattttttggtttaaagatactttgattggaaaaatttatccaggattaaagaaaatggggggtgctgttactatttatgggacagatatctctttggccaatttacaatctatcttgccagatttacttctgattgtagtaagctgcattgttttattggggatattttcttcgggaaactctaaacgaatgtggttagttatggtagctatgttactcggacttatttcgagaatcatgatggggttttcaccaacaatttgggcatcaggagaacgaacattcctatttttatatgaggcacttatttttggttgcttctatttatatgatcaaattgagaaaaagaaagaatatcaaattttaacgcacattttaattggaattggtggcctagctttctgtgttattttatatacagtttaatgagtttgtagacaataacaggttatccgtgagaaactgaagttaaaattggatacagatatataataggcactttcgataaatataaaatttaaatcggaagtgtttttaatttagctaataattgatacccctatgaaactaagctagaatgcattaggattttaaacttaggtatgagtggtggttaggctggaaaagcgacgtgctagtttatacttggcgcacgtagttacctaattttacttttatttatttgtttcaaaaaatggttgcagtttcgtttaaagaggctttccattgtaatctcaagctaataattgaagattttataaagtctagaaatctttaaagaattccttagatttacaggtaacgaatagtggttagacactgtttatgctacaataaaatagattattttaaattactaagaaacggagttaagttaaatggaaaatggtgtgggatttaaatctgtgggtgttgtttttaaaaaatattggtgggtcatttttgtaacaattatcattggtggcgctgttgggatcatgactgccaaatcaacaattagttacgaaacaacagctaaagtatatgttaacaaggggtatgtcgaagacaaaaaaggtaacggtatttttgataacgatgttgagcgtttttggcaatcaattaatagtttaagtaagacacaaagctttaaaaaggctatgactaaagaggttagagattattcaagcgataatttgttaattgatagtagcaacggatctaaagtcatagctgtgaaatatactggcgctacgcaagccaagagtattaaaggtgctaagtatgcgacagagcttttgaaaaaagaagtgatcaagtatgatgacgagaagagtaagttagttgtgattgaccaggcttcaaaagatacaactgcaacaataggctttagtaataagaaaacaaattctattatgggcatcatctatggtgcagtattgggcttcatcctcagtgctattcattttattgttatgcgtagaaagaattaggagggaacgatttggttaatccgttctttatgttcattctggctttttcagcagttattctaagtttcttttttggctggtccagtatttatccaagtttttcgagtgatgttattttcttttttattgtaatgttcttgttagccggcgtactaggatactttatctataaaagtaatgtgatatcttttaagaaaattaagagtacaacaaatgttgtttggttagtggttattgttttaataggcacattagctgaaggagcctacaatcatggttttccattacagtttatgctccaaggtaaggattccggttatacagaatttggaattccgacagttcacgtttttttactcactctgacagcttttttaacaacctacttgtggcatctaatcctctcttcaactgggaagttgagaaatcaatatatactactttgtgttctaagttgtattccgtatgttttagaagttaatcgcggaatgttcatgatggtgatgataaactgttttaccatttttattctagcaatctggaagaaaattaaagttagacatataattggtttagcgattttcggtatggtgggtctgtttttatttggtgttatgggaaatgcacgagtgaacacgtcatatcaaaatggtcgatcagcttttgattcagcgtcaattatgcaaatcggtggtgcaactgaaaaatttaaaagtagtaagattcctaaggagttcttttggggttatatttacgcttcatcacccgtggctaactttcaaaaaaatgtagattatagcaagactactgaaaaaataacagtttcaaaagtaaatagtatgttttttggtgagttactgcccaatttcattggtaagagagcacttgctaattcagattataaagaggtcaaaattcaacaaattacaccagaattgaatgtcgggacagcattaagtagtccttaccgtttattggggtggattggtgttactatgtacgtcattattatctttgcgggtgcatacgtgtatctgtacttcttatataagttgaattcaagatttttcattgtcgggttatccgtcttaaatacaatatttgcattaactatttattcaaatatgattcaagcaactggtttgagcttacaactagcatatccaattatatttgcactaatcgactcatacgcagattattctaataagagttacttgaaaatttaggaggattttgatggagacaattagtttcatcctaccaatctatggtactgaaaattcaattttagaggctgggttggaacgcttaaagttggcgaagacaacttcatttgaattcttactaataagtgatggcgctagagatgatttagtagcaatttgtagacgcttttcagaagaagacaagcgttttaagttgattgaacaagctaatcagggcgtatcggttgccagaaatacggggattaaagctgctaagggaacttggctgctttttgttgatccggatgacttattagcagagaaatttgaagaaatattgttagaaaaagcaagtactaacgcagatgttatcttttttggttttgatcgagtatatcaagacggtaaagttgaaaatagttttcctaaagataagctatttcccgctacaccggtatcaatggatgatttaattcgtgcaacgctttcggatggcgcttattataatggcatttatggatattttcttggaacaccatgggccaaaatgtttcgaaagtcttttttagaagctaatcaattattttacccagcaggaattattaagagagaagatgcgttatttagcattgaggttttcttgaagaaccctagaattaacattgttgattcgatactgtatcactatagaattgatcatgataattcaattagtaatagttaccgacaaggggttaaggaaagtttcattacagtttcgaatgatctgaacgatgatttagtagattggttacaacaatcagataacgcattatttttggattcttatatgttgagactctcgattgaactcttgtttgcagatttttgtaatctaagcaactctaagtcatatcaggaaagaaaaaatgagtttaagacttatctagaaacgcctgttgttagtaagcaaataaaaaatgcgagattagtcaatatgccaatgaaacagaaactattaggattactgattaagcagagaaatttctatttattaaattatttattgtttaaaagaaagcgtggataagaatttgaaagttgcagcagttattgtgacccataatcgtagggataaattagaaaaggcgattgatagtttattagagcagtccgcgccagttgaaaaaatagtggttgttgataatcaatcaactgatgatacgctagattttttgaaagcaaaagcgcgcgataacgcacaaattaaagtcattcattcagaagataatttgggtggcgcaggtggctttaatatggccttggcggcaactcttgagttgcctgaaattgattggattagtatcgctgacgatgatgcagtctatgatcaagattatatgaagaaaatggctgaacttagtgaaaaacatgccgatatcggttgttttacaggaactgttatcgaagatggtgaaattggaaccgaacatcgtgttaaaattgatgatttggaccggctacaattatctaaaattgacttaacgagctatgaaggtgattttccagttgatattgctacttttgtaggagtttttttgagaaaagatgtgctaaagaagattggcttaccggaaaagaatttctttatttggtatgatgacattgaatactcacttcgtattcgcaaggaaacagaaatgatcaataatatccaagctaagatttatcatctaacagataataatagtgtcggagcaagtggtgttaatcgtccaattggctggaaggactactatggttatcgtaatcgttggcaaactatgaagttacattgtgagaaccaacaaattctagctaagcaattacggtatgaacatttcagatatgcaatgggtgcctttttaaagaaaaaaggccaatattctagatttgctgccgtcaaactagttaatacagcctacaaggattttaaaaatgaaaaaatgggtaagaatgatgcattcttaccgttttaaatgaaagatttggtgagacagagtgactaatatttctgtttgcatggcaacttataatggtgtcaaaaccttacccaaacagataaaatcaattatcaagcaattaaccgcgcaagatgaaattgtgattatcgatgattgttcatcggatgatacaatggggttactgagggagttgttggtcaattttaacgggcaaacaattctgaaaagaaacgatcagaatatgggaccaattaaatcgtttgagaaagcactaggacttgcgacaggcaatcttgtttttctttctgaccaagacgatgaatggcatgatgataaagtggaaattattcaagatgcttatgtaaatgggcacgctgatttaattgtccatgatgcaactgttattggaaagaatggagaggttgttgatcagtcatggaatcactacaaccataaccaagttgaccaaagtgtatttagtaatttaattaaaaatggttatactggtgccatgatggctatttcgagacgattattagatgccgcgttgccttttccagaaaaaatcgaaatgcatgatcagtggctgtttcttgttgctaaaaagaatcattttaaaattacggcgacttctgctactttaatggactatgttcgacacggtggtaatgtcactggcatgagtaagagaaacaaaaaagaaatgttgattggtcgcttaagaatgctgaatacttatttaaagatgaaggagtcctcaaaatgaaaggtattattctagcaggcggttctgggacacgtttgtatcccatcacacgcgctttatcaaaacaattgattccaatctatgacaaaccaatgatttactatccaatgtcagtgctcatgttggccgggattcaagatattatgattatctcaaccccaactgatacaccacggtttaaagaattatttggcaacggcaatgacttagggttaaacatcgaatacgccgttcaagaacaacccaatggtttggcagaggctttcgtgattggggcggacttcatcggcgatgattcagtatgcttaatcttaggtgacaacatctattatggtggtggcctttcagaaatgctccaaagagcggctcaaaaagaatcaggcgcaaccgtttttggttatcatgtgaatgatccagaacgctttggcgttgttgattttgatgaaaatatgcatgctaaatcaatcgttgaaaagccagaacatccggcaagtaactatgcggtgactgggttatacttctacgacaaccaagttgtcgacattgcgaagaatattaaaccttcaccacgtggcgaactagaaattacagacatcaacaaagcgtatcttgaaaaaggccagctagatgttgaattaatgggccgtgggtttgcttggttagatactggaacccatgattcattacaagaagccagcagttttattgcgaccgttcaaaaacggcaaaacttgaaagtggcgtgtctagaagaaattgcttaccgcatgcactatatcgataaagcaaaagtgattgaattggcacaaccactcaagaaaaacgactacggtcaatatttattgcgattagtaaaagaagattaggggtaagtaatcatgggtaagttaaaagtcacaacaactaaattacaagacgttaaaattattgaaccagccgtctttggtgatcatcgtggattctttacagaatcttattcagatcgcgatttcaaagaagcgggcattgatattgatttcattcaagataatcactcactttcaacgcaagcaggcgttttacgaggcttacatttccaacgcggtaaagctgcgcaaacgaaattaattcgcgtggtgactggggctgtcttagatgtcatcgttgacgttcgtgcaggttcaccaacttacaaacaatgggaagggtacatcctttctgccagcaatcaccgtcaattacttgttccaaagggcttcgcccatggctttgtcactttgacggataacgttaacttcttgtataaatgtgatggctactatgatgcagaagctgacggcggtatttcattcaagacaccagaattaaacatcgattggccaattgattttgaccaagcaattacgtctaaaaaagatgctaaccaaccaacctttactgaatttgaaaaagataatccgtttgtttacggtgaaatttaaggagatcgacacactatgaaaaatattattgttaccggtggggccggctttatcggttctaacttcgtgcattatgtggtgaataaccacccagaagttcacgtgacggttttagataaattaacttacgctgggaaccgtgcgaacttggccggtttaccagcagaccgtgtggaattagttgttggcgatatctgtgacgctgaattagtggatcgcttagtccaaaagacagacgcagtggtacactatgctgccgaaagtcacaacgataattctttgaaagatccttcaccctttattcaaacgaacatcatcggttcatatacgttgatcgaagcttgtcgcaagtataatgtgcgttatcaccacgtttcaaccgatgaagtatacggtgatttaccattgcgtgaagacttaccagggcacggcgaaggcgttggtgaaaaattcactcctgaaacgcgttataacccaagtagtccttattcatcatcaaaggcgagctcagacttgttagtccgggcatgggtgcgttcattcggcctacaagcaaccatttcaaactgttcaaataactacggtccttatcaacacattgaaaaattcattccccgtcaaattaccaatattttaagtgggattcgaccaaaactttacggttcaggtcaaaatgtgcgtgattggattcatacgaatgatcactcaagcgccgtatgggcaatcctaaccaaaggcaaaatcggtgaaacttatttaatcggtgccgacggcgaacaaaacaataaagatgttttggaattaatcttagaattaatggggcaacccaaagatgcttatgatcaagttaaagaccgtccgggtcatgacttacgctatgccatcgattcaacgaagttacgggaagaattaggctggcaaccagaattcactgattttaaatcaggcttacaacataccatcgactggtatcgtgacaatgaagactggtggcaagcagaaaaagcagccgtggaagccaactacgctaaaaacggtcaataatgtggatgtattatctaggatattgaaagatatggagcaattatgaaaaagacgcttaacaatataatctacaacggtatttaccagttgttgatactggcattgccaattatcacagtaccgtatgtagcacgtgtcttgggtgcaagagcactagggagttattcattcattacgtctatttccatgtttctgagttttgtgattttgatggggatgaatcaattaggttcaagaattattgcccaatcccacaaagataaaggtgaactaggtagtaactttgtacagttatggaaaatacagtttttagtaggttgtttagtgattctggcgtatacgttctttgcaatgttcagtgaatataaaacatacttgctattgaatattccatatttaattggattcgcaattgacatttcctgggtcttcataggattaggagaagttagaaaagttgttgttcgaaataccttaattaaaatatgttctgttgcaatgatttttatatttgtaaagaaacctagtgatttaggttattacgtattaattaatagtttaagcatcttttttgcaaatattattttctggcttaatttaaaggggatcatcacaaaagtaagttttaaagggttcttttctaagtcaatctttttaaaagaagccatgattttagttatcccacagcttgcagttcaattttataccaattttgatagtacgctagtaggttggattgcagggcctgtccaattaacttattacgatcaatcacaacggattgcgcgaatgttagtaacacttattacttcagttagtaccattttaatgccaagaatggtccaacttcgaatgaatcatgctaataatgaaaaagtggatcagttattaaaaacatcacttgactatacattattagttgcacaactgtttactatgttactaatggtaaatgcatccgaatttgtaccgtggttttatgggaaatcatatacaccaatgacgaataatatgttatgggtcggtttaataatgatttttatttcctatggtgaagtatttggcagtcaattctcattggtcaatggtgattataaacaatatgcaattccggcaattgtgggtgcggtaattagtgttattttaaatgtgatttgtgttaatatctggggagcggatggcggaacggcggttattattttaaccgagtttatcgtatgttctatgagaatttacatggttcgtaaagaagcagatttacggtatctagttcatgaacagcttaggtatgtacttgcttttctaatgaccgttcttgctgtcctgaattttaaaattgtgttacctagtttgttcttaacaatggtagttaattcaattattgtgacaattgtatatgtattgctacttgtattattgagaactagaattaacagagatattgtcagattagtaaagaaagttactcgttaattaatgattgagataataatttagatttaggagaaaataatatgactaattatttagtagtcggttccggactctttggcgcaactttcgcatacgaggcggccaaacgtgggaaccacgttaaagtaattgaaaaacgcgaccacatcgctggtaatatctatacaaaggaaattgatggcattcaagttcaccaatatggggcccacattttccatactagcaacaaagaaatctgggaatacattaatcaatttgcagagtttaaccgttacaccaatagtccagtcgctaactacaaaggtgaaatctacaacttgccatttaacatgaatacgttcaataagttatggggtgtggcaacacctgccgaagcggccgctaaaattgcggaacagcgcaaggtgttgggcgataaagaaccagaaaacttggaagaacaagctatttcattaattgggacggatatttaccaaaaactaatcaaagggtatactgaaaagcaatggggccaaaaggctaccgaattaccatcatttattattcgtcgtttaccagtacggttaacgtatgataataattatttcaacgatacataccaagggattccaattggtgggtatacacaaatcattgaaaaaatgttggctagtgatttaatcgatgttgaaacgggtgttgatttcttcgataagaaacaagactacatcgatcaatacgataaagtcatctttaccggtatgattgatcaattctttgattatcaattaggggaactcgaatatcggagtttacgctttgaaaccgaagaaatggacgttgataactaccaaggaaacgcggtcgttaactatacagatgccgaaacgccttatacacgggtgatcgaacataaacactttgaatttggtaaaggcgataagaataaaacaatcgtgacgaaggaatatcctgcgaactggtcacgtggtgacgaaccttattacccaatcaataacgacaaaaataaccgcttatacaaagcataccgcgatttatcggtgacagaacccaaagtggtcttcggtggccgtctagggcaatatcgttactacgatatgcatcaagtgattcatgcggcattacaagttgttaaggatgaattaaaatagaggagatttattctatgaaaattttaatcactggtgcaaatggtcaattagggaccgaattacggcacttattagatgaaaatcaaattgaatacgtggggacagatgctactgagttagatattactgattcagcggcagtcacaacttacttcgaaaagaataagccggaattggtttatcactgtgctgcttatacagctgtcgatgctgctgaagaagaacctggcaagtcaatcaattacaaagtgaacgtggttggaacgcaaaacattgccaatgctgctgaagcaatcggcgcaacgcttgtttacattagtacggattatgtctttgatggtacgaatgatcaaatgtacacagaagaaaccccagctgcacctaagaatgaatatggtcgcacaaaattggctggtgaagaagccgttgcaaatacaatgagcaaatactacatcatccggacttcatgggtctttggtgaatatggtaagaacttcgtttacacgatgttaaatcttgcgaagacgcatgatcatttaacagtcgttagtgatcaagtcggtcgtccaacttggacccggacgttggctgaattcatgttatacgctgttcaaaacgacgtgccgtatggcttgtatcaactttcaaatgacaattcatgtacttggtatgaatttgcgagcgaaatcttgaaggataaagacgtagaagtgagtccggtaacatcagacgaatatcctcaaaaagcattccgtccaagacattcaatcatggatttgacgaaggtcaaggcaactggttttgaagtaccaacctggcaagtggcattacaaaaatttatggcaaaaattgattaggatgagatgatgagtaataatctggataaaacggtgacgattagtattgtgacctataatagtcaatacgtctttaagacgttagatagtatcaaggcaactgtcttggggcaatacccggtaaaagtattggttcatgataatgggtcaacacctgagtatttggcgcaattaaaagcctatgctgcagatgatgttgaaatcattgaaggccaagagaatcttgggttcggtcatgggcataatgccaacctgaagctgacggcatccgattattttctgatttgcaatccggatattattttaaatcaaaacgcatttgaacagatgtatcggattttagcggatcaagatgctaatgatagcttagggatgctaacgccgaagattgttggtccggatggtacgacccaacatttagtacggcggaagctagatgtcttcgattatatgctgcgctttgtaccttttaaatgggttaagaagctatttgaaaaacgcttggcggcttatgaatgccgggatttaacggatcgacggcaagtgattcaatatggatctggtgcgttcatgtttacgcggactgatgtgattcgggctattgatggtttcgatgaacgcttctttatgtatttcgaagataatgacctttgtgatcgaattaaccaaagcggtcatacgattttatatgtaccagacgcggttgtcactcatttttatggaatggcatcccaccgcagtttcaagggatttaagatcttcttgaagtccatggcacagtattttaataaatggggttggcgtttcttctagtctcaaacaaaaaagacggttttctaccgtcttttttgtatgcctcttttattttatgatatagttatactaaatatatctctaattaggagcttaacatgccaaacttataccctgatgacagtcttttgttgcatacagacttgtatcagctgaatatgatgcttacttactttaaaaaggacttgcacaatcgcacagcagtttttgaatgttatttcagaaaattaccattcgaaaatggttacgcaatttttgctggtttagaacacatcgtgaattatctagaaaacttacacttcaccgaaagtgacatcgcttatctacgtgatgaggtggggtatccagctgattttcttgattatttagccaatcttgattttgatttaacaattcgttcagcagttgagggcgaattggtttttgggaatgaaccgattttacaaatcgaaggaccattggcgcaatgtcagttaattgaaacggccttgttaaacatcatcaattatcaaacactaatcgctacgaaagctgcacggattaagtccgttgtcggcaaggatcctgttttggaattcgggacgcgccgtgcccaagaaatggacgctgccttatggggcactcgagccgcttatatcggcggttttgacgctacaagtaacgtacgcgcttcaaagatttttgggattccagccagtgggacgcatgcgcattcactcgtacaagtctatcgcaatgattatgaagcattccgcgcttatgctgaaacgcatcacgattgtgttttcttggtggatacgtatgacaccctcaaaagtggtgtgccaagtgcgattcgggtcgctcaggaatttggtagtaagattaacttccaaggggtgcggattgatagtggcgacatggcctatatttcaaaacgcgtgcgccaacaattggacgaagccggttttaccgatgctaaagtttacgcttcaaatgatttagatgaaaagaccatccaaaacttgaagatgcaagaagccaaaattgacgtttggggtgtcggcacgaaattgattacggcttatgatcaacccgcgctaggggctgtctataagcttgtttcgattgaaaacggcgacggaaagatggtcgataccatcaagctttcaagtaatgttgagaaagtttccacaccagggcgcaagcaagtttggcgaatcactaaaaaagttgatggtaaatctgaaggggattacattacgctttgggatgaagatccactggaacaagattcaatttatatgttccacccaaattacacgtacattaataaaactgtgacggactttaatgcgcggccaattctacggacgatttttgaacacgggcaacgcgtttacaaattacccgaacttggcgcgattaagaagttctgtagtgaaaatctcgactcgttatgggatgaatacaagcgggacttgaacccgcaagattacccagttgacctttcacaacgcacatgggatcacaaaatggcccaaatcagaagagtcaaagaagaagtccaaaatcagagtggttcattcaacggttagcttttgagtatagtgaagtctggtgaataagtgcgctagcgcttatttgccggacaaagctgttgaaggaagcgcgtttcaaaaaagttagcaatctaacatttaaaaaaggtggtatttaatcatgagacctttacaagctgaaattatcgcagccttaaagacccaacctacaatcgatccgaaagcggaaattcgacggtcagttgattttctaaaagattatttaaaaaagaatacatttttaaaaacatacgtcctcgggatttctggtggccaagattcaacattagtcggtgctttagctgaacaagcggtccgtgagatgcgtgctgaaacgggtgatgaaacctatcaattcatcgctgttcgattaccatatggtgaacaggcagacgaatcggatgcaatggctgccattgatttcatgcaagcggatcaggtccggcgtgtgaatatcaaagcgtcagtggatgcaatggttcaagcactggcggaaacagaagtgacagtcagtgattttaataaaggtaatatcaaggcacgtgtgcggatgattgcgcaatacggtatcgctggtgaaatgaagggtgcggttttaggcacggatcattctgctgaatcaattaccggtttctatacgaagttcggtgatggtggtgctgatctcgtaccgattttcagattagataagcgtcaaggcaaagcgatgctggcggaattaaaggcaccaaaacacctttacgaaaagattccaaccgccgatcttgaagaagaccgcccagcattgccagatgaattagcactcggtgtcacttatgatcaaattgatgattatttagagggtcgtgaagtggcagaagaggctgctaccaagattgaaaagtggtaccaaaagacagcgcacaagcggcatttaccaattactgtttttgatacattttggcgttaatcggctggatttcgtttagccgctaaattaattggacgtcagaataatgttttacttgcgttttagattggttctgtcttataattagtttaacgataagggagtaactggcagcttgtctgcgataacgccaccaacaaggcaatattctggtgttatcttaattagtgagacttatgggggattctttgaattctctataggtctctttttttaccccgaaatctatctataggaggcacgacaatgacagatcaaccaagttcattctttacccaatcaacggatgagactttaaaaagtttagccacaacaactgatgggctaacgcaagaccaagttgctgaacgactcgctaaatacgggcgtaatcagttgactgagactaaacgaaaaagcttgttcgttcgttttttagaacagttcaaagatttcatgattatcgtcttattagtagcggcaatgattgccggctttttagcacatgaatggccagatgcgattattattctcgccgttgttatcttgaatgccgtttttggtgttttccaagaagccaaagcggaacaagcaattgatgctttaaaagagatggcaaccccggacgcacatgtacgccgtaacgggcagattgttaaaatcaagagtgaagaactggttgtcggtgatatcgtgctattagaagcgggcgatatcgtcccagctgatttacgcttgttagaatcagcggctttgaagattgaggaatcggctttgacgggtgaatcggtaccggtcgataagactgttgcaacgttaaccgatcctgaaagtgggattggcgatcggaccaacatggcattcatgaatagtaatgtgacttacggtcgtggtgtcggggttgtgacgggcactgggatgcaaactgaagttggtaaaattgctgggatgttaaatcaagctggtgaaaccacaacaccattgcaaatgaatttaagtcaacttggtaagagtttaacgattatgattttaatcattgcggctgttgtatttgtggtcggctacttacgccacgcgcaatcaccaattaatatgttattaacctcaatctcattagcggttgccgcaattccagaaggattaccggcaattgtgacggttattttagcccttgggacacagaaaatggttaaacgaaatgcgttggtacggaagttacctgctgtggaaacactggggagtaccgacattattgcgtccgataaaactgggacgttaacgatgaatcaaatgacggtagaaaagatttttaccaataatcagttgcaagaagcatcagccgacttggcaggcgatgatttagcgttaagcattatgaaccttgccaacgatacgaaaatcacagaggatggccagttaattggtgatccaacggaaacggctttaattgcttatgggcgtgataaaggtttcgtgatccaagatgccctagcagcagcaccacgcgtgggtgaagtaccgtttgattcagaacggaagctgatgacaacgattcatcaagccaaagatggtcaattattaatgaccactaagggtgcaccggatgaattactcaaacgcgtgagtcattttattgatgccaatggcgatgttcaaccgttagatgaagatgaacggcaatttttactcaaaacaaaccacgatttagctaaacaagcgttacgtgtcttggcattagcgtataaaccgttagatagcttaccagcaacaattgatccgacgattgaagatgagttaatctttgctggtttagtcgggatgattgatccagaacgaccagaagccaaacaagctgtaactgatgcgcattcagcagggattcggacgttaatgattaccggtgatcaccgggatactgcagaagccatcgcccttcgtttagggattattacacctgaacaagatgcggatgcggccgttgtgacaggtgccgaactggatcaaatggatgacgagacatttgctaaaaaagtcagtcagtacgcagtttatgcgcgagttgcgccagaacataaggtgcggattgttagagcttggcaaaaacatggtaaagtcgttgcgatgaccggggatggtgtcaatgatgcgccagccttgaagtccgcagatatcgggattgggatggggattaccgggacagaagtatcaaaaggcgccagtgatatggtgcttgccgatgataacttctcaacgattgtcgtggctgttaaagaaggtcgtaaagtctttgccaacattcaaaaatcaattcaatatttattgtcagctaacctaggtgaagtccttaccttattcatgatgacgattttaggctggcaaattctgcaaccggtgcacatcttatggattaacttagtgacggatacattcccagcgattgcgttgggggttgagcccactgaaccggggattatgaatcaaaaaccacgtgggcgcaagtcaaacttcttctccggcggtgtcttccaagcgattatctatcaaggtctcttagaaggtgggattacgcttggtgtgtatgccttagcgattacgtacccagtgcatcaagcgagcggcttagcacatgctgatgcgttaacgatggcctatgcaacgttagggatgattcaactcttccacgcgtttaacgtgaagtcagtacaccaatcaatctttacagttggctttttcaagaataaagctttcaactgggctgtcttagcttcattcctcctgttagccgcaacgattatggtacctggcttaaacggcctattccacgtgtcacatctcgatattcaccaatggggaattgtcctagcagcctcattctcattgattgtgattgtggaaattgtgaagttcttccagcggagaatggctaaataatttgttgccaaccttgtaaagtgcttgtcaattaaactataataaaggtgattaaataacttttatgttagtgagttttgtagggaggattacgtatgcaaatattcttacagtttctgatatcacttttcatctttggtggtctggaacggattactcacgttcaaaataattggttgttgagtttcttactttatttagttattttcgcttgtatcgacttattgacaaagttaatgtttggtcagtcgtggacgagtagaatgttgaagagaagataggtaataatcgacgctagtgacaaacgagattttgtcgctagcgtttttttaatgaggtaaatgtcctttgatgaactaagcatgccttttctattaatgacacatgctttaatattttaattgcaagccgattgggaaattagtatactaaaccataggaaactaggaggatggacatgaataaaacgcaacaaaagcttgccaaatacggccaagctgtcaacgatttaatcgataatactgaaaaagtacaagaagggatgagtaagtatttcacccctttaaaagcagccgttgctgatggtaagttagccgaaatgagcgaacaagactatcaaaagacagcacaaatcttcagagatggtgttgatcaatatcacgaattcttagcacaattcaaaacagttgttgcgcccgctcgtttgatggggaacaaccaacgtttaatcggtgcttacgctgatttcattcaaggctgtgaagatttaattacaagcatgcatgatgatcaaaccgttgatatgcaagcttttgcagcttcagaaatgaatcaagacaaagcaacggaacggatttctaaatacatccaaaatatttcaagaatcgcttagggcgaaagttgacagttcccaagtcgggggctgtttttttaattgaagcaaaaggagtgcaatcagatgcctgatattcaaaatcttgtgattcaacaattaacacagtatcgaccacaacaaatcaaagcaacgttaggtcttttagaagaaggcaataccgtaccgtttgttgcgcggtatcgaaaagaacgaacgggaagcctcgatgaagttcaaattcgtgaaattgaaagcacatttcaatacttaacgacgctcgaaaaacgtaaaaccgatattttgaaaaatatcgctgaacaagaaaaattaacgccaaaactcaaacaacaaattgaaacggcaacgcaactgcaagctttagaggatctgtacttaccctataaacaaaaacgacggaccaaagcaaccatcgctaaagaagccggcttggaaccttttgcgcagtttatcgcagggttacctagcttaaccgaacaagcattattggcaaaagctgaagcttacctcaatccagatcaaaaaatcaatgatacagctgctgttttagctggtgttcatgaaatcttggcggaaaatattagtgaaacagcaaaatatcggaattgggtgcgccaatatacttggcaaaatggtcagttggccagtcaagttaaagacgaagcagccgatgagaagcaagtttatcaaatctattatgatttcactgccgatttaacgaaggtagcggaacatcaatatttagcgattaatcgtggtgaaaacgaaggtattttgaaagctaaaattatgattgacgatcaagtaattgccagtcggatcagccaagatctgttgtatggacaagattcagcgtcagcaatggtcatcaagtctgcggttgaagatgcctataagcggtttattggaccggcaattgagcgtgaattacgcaagcaattaaaggagaaagctgatcaacaagcgattagtgtctttggtgataacttgaagcatctcttgttgcaaccaccattgaagggtaaagttgtattaggctttgatcccgcttatcggactgggtgtaaattagccgttgtcgatggcactggaaaattcttggataagttagtcatttacccacacaaaccagcttcagctgacaaacgatcaaaagcggcggatgaattcactgctttactcgagaaatatcaagttgaaatgattgcaatcggtaatgggactgcgagtcgtgaatcagaagaattcgtagcgacgtgtttgaaatctatttcccgggaaattttctatgtgattgtcaatgaagcgggggcttctgtttattctgcgagtgatgcagcacgggcagaatttccagatttacacgttgaagaacgaagtgcgattagtattgcccgtcgtttgcaagatccgttagctgaattgatcaagattgatccacaagcagtgggagttggacaatatcaacacgatgtggcgcaaaaagagctcactgtgcaactcgatacagtgattgaggatgtcgtgaatagtgtgggagtcaacctgaatacggctagccctcagctgctacaacatatctcagggttgtcagcaactactgctcaaaacattgtgcaatatcgcaatgaaaacggcctttatcaaaagcggagtgctttgaagaaagtaccacgcttagggcctaaagcttatgaacaatcggtcggattcttgcggattattaatggggacaatccactcgataatactgatattcatccagaaagttatccaacggctaaagccattttgaaatcatttgggttaaccgttgatgctttaggaagcgatgcgttgaagacggcgattgcacaaatgcaagtaccggctctagcggctgaattagaggtcgggattgaaacaatcaccgacatcttaagtagtttgcaaaaaccagggcgtgatttacgggatcagatgacggcgccattgttacgtcatgatgtcttaaccttggcggatttgaaaccgaatatggcgttagaaggcacagtccgcaacgtgattgattttggggcctttgtcgatattggtgtgaaacacgatggcttagtgcacatttctcaactggcaaaccactttgttaaacatccttctgatgaagtggcagttggcgacgtcgttcaggtttgggtgatgagtgttgatcaagaacgtgaacgcgtacaactgacaatgaaagcgccaaaggcaaatgactgatcaagccttaactgaattgattgaacggttatcgttgcagttttttaatcggccgtttgtgcatcaagcaaatttcaatcggcgtttaaaaacaaccggcgggcgctatcatttacaggatcatcatatcgatatcaatccaaagatgttgaccgaacatgatacacagaccttagaaggggtgattaagcatgagctttgccattatcacctgcatctgttgcatcgcggttaccgtcatcgagacgcagagtttaaacaattacttgcacaagtcgggggtgcgcgctatgcaccagctgcacaaaagacagctaaatcgagcaaaattgtgatttataaatgttcagactgtgggcaagtctatccacgtcgccgtcgaatgaatacggctcgctatgtttgtcggcggtgtcatggacgactgatttatcaaaccacacaaattcaatgaaaaaaggccacccctaaacataggggtggccttttttttagttggcgcgtaaagtttgattctgagtggtgtagcccagcttctgatagagggccaacgcagccggattattccctaacacggttagttctaaataatcgagcgcttgtgtttgttgccattgctttgcggacgatagcagttgtgtagcgacgtggtggcggcgtgcctctggtgcaacatacagtgttgtgagataagcaaagcggtgtgcgataaacaagggtgagggacttgtttgggctgttgtaacgtgacaaaaggcatcgatttgcgcatcttggttttgatgaacaaagactgcttgtagtggatcagttatcatttgttgccagtcaaagaactcaggcgtgtaatcagcttggtaattagtgggttgtagcacatgcatttcagtcgttaattgttgatacagggtggttaatttggcaatatcggttagtttagcggggataatgggcatgtaatcgtctccaaagtaaaattttaattgacttcaatcatcgtttctcttatactaatgtacgtggcttaaagtgataaagcaagttacgcgggtgtggcggaatggcagacgcgcaagattaaggatcttgtcgggaattttcccggtggaagttcgagtcttctcacccgcatcataattcagttaggtaattccaattggaattacctttttttgtcccttgatgtaaatgattgaaactagggtgacaaatcgctataatgagcaataaattcagtttaggagtcagttaggatgacacataaaaattcatcagcttatacgattagtattatggcgattttaaccgcttttttaatcattcaaagttttattccgatggtcggttatattaatatcattcctgggctaccagccgtaacaacaattcatttaacggtcattattggggccgtgatcctgggcacacgccaaggggcgattctaggattaatttggggtttgatttcattatttagagcctatacctctccaggcgatccgctttcacttttaatctttcaaaatccaattatcgctattttaccgcggttgatggctgggatgattgctggctttacgttccaacacttatatcaaactaaaattcgtaaaaccggtgcaatggctttagctgggattttcggggctttaatcaataccattttagtgattggcttaacgcgtgtgctttacggacaccaagcggcagggatgtatcatactgatccgacccatttaatcatcgtgatgcttggcgttgttgcgttaaatgctgtaatggaagcaaccttagcagctgtggtgacaccactagtcgcaacaccactcatgcggtttaaacggacgcaataacaagtgcgggtagctacagccgacgattgtggtccgccacgggttgaataattaaagattgaaaaaaggagttggacaaacgtgactttgtccaactccttttttgtttattccagttgtttttgcactttcttagcatgcgcagcaactgtgttcatgttgaccttagcaatttcggcttgttgataaactgaactgtaatattgatttaaacgattgattggtgatttaagactgtcttcgtctgcatcagcatctgtatggtcgctgtaaaattcatcagatgctttagtggccgcgttgtagaaggtggccaaggttgtataatcaagtgtcgaaatcttaagactttgatttaaatctttgacttgttcaatcggcaattcatcgttttcttgcttgaccagtttggtgaggcgtttaatgaccggtttgagcacagcttgttgttctttaagactttgaaaggctgcttcgcgcttggccgcagtcgtcgcaatcttagtatcttcaatcgttaatagattttcgtcgggatattttttttgaatcgtgagatagttatcaggaactggatcgccgattgtttcgagggttgaaagagctgttcgttgttgcttagtcgcatcttcaacggtttgcatatcggcttggagttgatgtttagtatccatcggtttttggcaagcggctaggctcaccccgatgaagataattggtaatagccgtttcaatagttttagcataagcaagcactccaatgagaaaaagttatactgctatcttaacgtaattaaagcaaaaagccaaattatttagggcatgattcaacatataaaataacacttgtctaaaaacacggatgctgattgtccgtgatagaaaacggtttatttttattgccaaatggttgccaatggttgttgcctgtgttacactatgtttgtactttttgaatggttgcggtacgaatgtttccaaaagaactttcttccatcggaccaccagaaatacacaaatttataatgtgtcatcgacacaaggaggatttttctcatggaaaacggaactgtaaaatggtttaacgcagaaaaaggttacggctttgtaactcgcgaagatggtagtgatgtattcgtacatttctcagctatccaaggtgaaggctacaagactcttgaagaaggtcaaagcgtttctttcgatatcgaagaaagcgaccgcggcccacaagctgttaacgtaaacaaaaactaatttaaaaattaacctaggggtcgcggcaaaagcaattttgtcgcgacccctttttttgattgggtggtgagctggagatgttaacgtatcaattgattgagggcgcagcacggcgacagtggctggatgatctattgttagcggatgaagaagtcggcatgattgaacgctatttgatgcatgggcaattttacaccgtaagcgatcagcagcaagtcatcggggtcttccatctgatggcactcaacaatcagcaggtagaacttaaaaatattgcggtacggccagaatggcagcatcgaggattcggtgggcaaatgatgactcaaattcagacgattgcaattgaccaagggtttcaatcattgctagttggcactggggacggcagtttggcagcaattggtttttatttgcgttaaggctttcggttcgaacaaattcgcaaaaacttcttcgaccaatatcaaacgccaatctatgaaaatgggattcgcctaaaagatatggtggttctcgctaaaatactctaaaaaaacctgaccaaattggccaggttttttgaatggattaatcgagatcagtgcgtttttcaaatggatagacaaagccccattcagcacgtgcgtctgacatgatgtccatgacatcgcttgataattcgagggtatcgtttgattgatttccgcgcactgtttcttggaaatcatggagttcatagttcattgcgttggttgcgtcacccgcttgaatggtctcaacgcgaccatctgggaaagtgagggtggctttgtcaggccgtggataatcgtcaacggtgacatagccattttcataaacgagaacaccttgtttaggcatcttcgcatgaatgtttaaggtaacagtcaccatttcatgcttggcattatttaaaagtaatgttgattgctgatcaacaccggattctgatggcacccattgcgtcgctacaagttctggtttagcagttaacatccgacgtgcaaatgagagggcataaacaccaatatcaagcattgcaccgccggcaagtgcgggactgaagaagcgattgtttggatcaagctctttataacttccaaaagagacttgaattgattttaaagcgcctaagtgattagcgacttgttggcgttcaatctcagcaaacaatggcatgtgataaatggtcattgcttcagctaatatcaagtgcttttcgttagcaagagcctttgctgcattgagttcgcggcggttcatcgtaatcgctttttcacagaagacgtgtttaccggcttcaagactcgccataatgctttcgaagtgataattgtggggggttgcaatgtagacgatgtcgatgttgtcatcagcgagcatgtcggcataactaccaaatgcatgtggaatattgtattggtcggcaaaggcttgtgccttatcgagtgaacgagaagcagccccataaatgtgaccatcaggttggttaaaataagttgcgaaactattggcgatattgcctaagccgataattccccagttaagcgttgtcaataaaatcagtcctttactatcgtaatcggttacagccaatattatagcaataaaagcgctaaatagaaattaaaggggggttacaaattaaagattggtgttctgaatgaatttgtgtacaatatagaatagattcagataaagttgaggcagaggattggcaaaaaaacgtaaacgcaagacgacaaaacgcaaaccaacagctaactactattctaagaagagacgccacccaaccgattggctagtggtcgttttagtgagtctatttattctcggaattgggctcgttttattagttcggtataatggacaaaaggcccaagaagaacttgccgatcaagccagacaggaacaacaatcgcgccaagctaagaagcaagcgtttattaaaaaaatggtgccatatgcccaagaattacagacgaaatatcatgttttaccaagtattactttagcgcaagccattttagaaagtgattgggggaagagctcacttgctgcgcaataccataattatttcggtattaagggtgataatgaggccaacaccaaggaaatgacgaccaaggaatatttaaatggtcagtgggtaacgacaacagcgcgttttagagtatataacaattatcaagaatcgatgcttgaccatgtacaattgtttgcttatgggacctcttggaaccggacgcagtatgcacacgtaatcgcggccactaattatgagcaagctgcccatgcattacaacaagacggctatgcgactgaccctgattatccagcgaagttaattgagctcgttaaggcttaccacctcgaccaatatgatcaataaagaatgctatgaaacaaatcatgggaaatctgctactaattaatctcaaaagagcctgccacaaattccggtttgtgacaggctcttttcaaatcgctgaataactggatttgagcttgttgtgttgctttttttgtggtaatctatttttaattcaatttcagaaaacattattagtcgttactactatcggtagtgatgtttaacgatgctacaaaggagagctcagcgtgcgactattagaggaacgcattaaaaaagatggtcaagtattaggtcaagacgtattgaaggtcgataacttcttaaatcaccaagtggatccagatttaatggctgcaatgggtgaagaattccaacgcttatttaaggataagaagattactaaaatcctaacggttgaatcatctggcattgcgcccgctgttttcgcgggcttagcattccacgttcccattgtttttgcaagaaagcacaagagtttaacgttacaagataacatgtatagcgcaacggtttattcatacacgaagaaagtgaataaccacatttcaatttcgaagaagtttctgaatgcagacgatcgcgttttagtgattgatgatttcttagccaacgggcaagcggttgaaggcttactttctattattgaagaagccggcgcacaacttgaaggtgtcgggattgtcatcgaaaagactttccaaaaaggtcgcgaattgttagatcaacgcggcattcaagtggaatctttagcacgaattgcagcgtttgaagacggtcaagtcgtctttttagacgaaaataaataaatgttatttaacggagtgctgagaggcactctttttttgtctaaaaatttgttatcatggaggaaagtattaggcagacaacgcttaaattcgctataataagggtatacagtttggtgaacaggaaagcaggtaatatgatgccagttatttatccaggacaaaccatcggaattattggaaatgatcaacgggcctatatgttggcgctcaaagcaaaagaaatggggtatcgggtagccgcgattgtgaccccgcagatgcaaaatacctcatttgcacgtttaattgatagtcagatcgatggtgaattcaatgattatcaaacattagtccaactcggtgaagtcagtcaagtgttgacctatacgaatgaattattagatgagacagtgctcgaacaactggcacaacattattatctacctcaaggcagtaatgtgttgtctgtgacgcaagatcggtacctcgaaaaagtctttttgagtgatttaaatatcaatattccgccctatgcgacagttgttgatgtagatgatattcaagatgcaatcgattcaatcggatatccatgtatcttaaaacccattcaaaaaggttacggtaagcagtatcaacgttttattcaacaaccgagtgaccttgaaaacattgaagctgcccttgagttggggacttatattttggaatcttggattcccgacgcacaagaactatcagtgatggtcgttaaaactgaagatggtaagtgtgtgacactgccagtcatcgaaaatgagtttgaagatcatcgcttgaaaatgtcgcttgtgccagcacggattaatcaagatgttgcgactgaaattaatcgattagcccacttaattggggaaaaattagactatacaggtgtttttggggttgaattctttttaacacccgctatgaatatttatgtgaaacgaattatgccaacaccgcacgcaacgggcgatgtcttgacacataccttgaatttctcgcaatatgaatatcatttgaaggccatctgtcagttggcagtcggcccatcacgcctcaataatgcggggatgaccttagggattcaagaagcacaacggtcattaattcaaacacagatgaagatcaaaccggattggtactttaatttgcacaacgtcacgaccaatcaacagattggatcggtcacagcaaccggacaagccatccaacccttaatcgataattacgaagcggcagacttatattagagtgcgacagcgggcggttatcttttgaggactagcataggccggcgaatgagcgacgcagtcgatcgttggacggacgtagctagccgcagaaagatgcccgatggagcacgtttcaaaacagagtgcatttgtggcggttatcttttgagcattaactggatttgacgagttggtgatgcaatcgcgaatttggcaaatttggttaagcacagaaagatgccacaaaaagcacgttttaccatcaccagcatttaggtagtatttggaggagaagtttatgttagaacgttatacacgtcccgaaatgggcgccatttggacaacgaaaaatcggtatcaagcttggttggaagttgaaattctagctgtcgaagcgtgggcaaaattaggcgatattcccacagaggatgcgcagaaaattcgcgcgaatgctagctttgatttggcagaagtcaatcgcttagaagccatcacacaccatgatgtggtcgcattcacccgtgccgtttcagaatccttagcggatgaaaaaaagtgggtccactatggtctaacttcaacggacgttgttgatacagcacaagggtatattttgaaacaagcgaacgatttaatccgggctgatatcgccaattttatggctgttctaaaagataaagcttacgaataccaaaataccgtgatgattgggcggacgcatggcgtgcatgctgaaccaacgacgtttgggttaaaactagcaacctggtatgctgaaatgaaacgcaatcaagaccgttttgaacgcgcagcaaaaggcgttgaagccggtaaaatcagtggtgcagttgggactttcgccaatattccgcctgaaattgaagcctatgtgacagaacacttagggatccgggcccaagatatttcaacgcaagtgctcccacgagatctacatgctgattacattaacacgatggcggtcgtggcgacctcaatcgaacattttgcgactgaaatccggcatttacaacgaacagaagtccgcgaagtggaagaattctttgctaaaggtcaaaaaggctcatcagcgatgccgcataaacgcaatccaattagttctgaaaacgttagtggcttagcccgtgtgattcgcggtcatgtgattaccgggatggaagatgtgtcattatggcacgaacgcgatatctcacatagctcagctgaacggattattttacccgatactacgattttattggactacatcttgaatcgcttcacgcggattgtgaagacgttgacggtcttccctgaaaagatgaaggctgacatgaacatcacccatggtttaatttacagccaacgtgtcttgttgaagttagtggatgcgggtctgagccgtgaagcagcctatgatttggttcaaccgaagacagccttagcatgggatgaacaaaaagatttccgccaattattagaagccgatccgaaagtgacgagtgaactttcaaaagccgatttagacgacgcctttgattaccaatggcacttaaaacaagttcaaacaatttttgatcgggtgtttgcataagcatccgacataaaaagccaccttagcctaaaagttaggttaaggtggcttttttatggcaaaataaattctgattcgaaacgacaaacttggtgatggttactgagggcgacttcaaacgctttttgccctagggtgaagaagtgatggtcaattgttggcagttgcaataaaaaactggataattgtttttcttgaccaattaaaagcggggtcggcagttgatgatccagatgatattggcggacaccagcggcaatgtcgtcgccatttgtaaaatagcaagcgagggttggctgtttttcaaccagttgttcagcggcgcgatagccatcttcaaatgagcgcatgccaccgaccattaactcggaatcaggttggcagttgaaaacttgttgataagcgttcgtgacggcaatccaggtcgggctttgcgctaaattacgacttaatagtagaccaatttgctgtgctttgtgggctttaaggtacttgaatgccgctaaataggcgggctcacggtgagaataaacggccgagatatgatgggtccccgggtcttcacaacagacaatttgaccataacgcgtgtactctgctaagactgagagtgcaataccatgtgaagtaaaaatgagtgcggtaaaattcttacgttttaattgttcgagataatctagttcgactgcttgattatattcggaaggtaggagcacaacgtgatagccgcttgaaaacgcagcatccataatcccgtttaagagttggttgaaatacggatggtcattgtgcggtaggacgaccccaatagttttattttgaccgaagcttaaatcgcgcgctaagctattaggcacgtaatcgagttgtttaatgaccgcttcgattgccgttttggcaggttcagagacgtatttttgatgatttaacacacgggagacggtcgaaaccgaatagccgcttttgcgggcaatatcacgaattgttggcataatcctaacctactttttgattaactttagtaatgtatttctttagaccatagctgaagccactgtgatgattagtcttcgtaatgaattgacccgccatctggatttgatcactggcattgcccatgacgatggggtggccaactagcgataacatggctaagtcgttttgaccttcaccaaacgcggcgcaatcagcgactgttagtccagtgttttctaagatggtggttaatgcgttagctttagtggcttcatgactcgtaatttctaaggtcattgtacctgattgttgtactgaaagaccaggcaagtggcattggttgatgaaatcagcaacagttgcccgttgttgtgtcgtttgcataatcagttgaattttgaaaagcttgagaaatggattttgcaattgatcaccaaaattgatgagcgtcggcaattgaccggtttgcttagcgattgcctcaataccagcgtcaattgtctgcgtgtaccagtggtgtaagtcatacgcacttaaactgatgtcactaaattcagattgtaatgcggcaattaatgttgcgacagcagaggttgcaagtggatattctgctaaaaccattgggaaaagatctgtcggttgataaattaaccccccgttaaaagcgacttggggtgtcgttaacgctaactgatcaatcgtagcttgcatttcttgtggtgaacgcgcagaaatcaaggaaattgggattgggcttgctttgacagccgcaatatctttttcagaaagctgtccgtcttggtttaacaatgtaccgtctaagttagaaaaaatgtatttaatcatgatgcataccacctttcttggattaaggtgagtataatttatgaaacgcgtcccaggtcaaggcagaagattgcgaaaaattagaatccgttttactagatcgtgttcgcttttttctacctatctagtttggtataatataggctgattgcatttacggaaggatgactaatttgtctgaaaaagaattgttacaagggatgaacgataagcaagctgaagcggtcctcacaacagaaggcccacttttaatcatggcgggtgctggtagtgggaagacccgggtgttaacgcatcgggtcgcttatttaattgaagaaaagcacgttttaccatggcgcgtgctggcgattacgtttacgaataaagcggcgcgtgaaatgcgtgaacgggtcggtaacttactcggcgaaggggctcaagatgtttgggtatctaccttccatgccctttgtgtgcggattttacgtcgggagattgaacaaattggctacaatcgcgcgtttacaatcgcggatccttctgaacaattgacgttaatgcgccatgtttgtcgggatttaaacatcgacacgaagaagtttgaaccaaaggcgattttaggcacgattagtaacgccaaaaatgaactccaaacaccaagcgactatgcgggtctagcaaacggaccattcgaaaaaattgtggcccaatgctacaccgaatatcaaaaacgactccaacaaaatcaagcgctcgatttcgatgatttaatcatgcaaacgatccgcttatttaaagaaaacaaaccaacgcttgaacactatcaagaaaaattccaatacatccacgttgatgaataccaagataccaatgaagcgcaatacacattggttaacatgttagctgataaatacaagaatctctgtgttgttggggatgccgatcagagtatttatggttggcggggcgctaacatggacaacatcatgaacttcgaacatgattatccagatgctaaatcagtgatgttggaacaaaattaccgttcaaccaaaacgattctagaagcagccaacggtgtgattaacaataatcaatatcgtaaacctaaggaattgtggactgaaaataacgaaggacaaccaattacttattatcggggtcaaagtgaacgtgacgaagcactctttgtcattacgaagatccaagaagaaatgcaaaagaaccaacgtaaattcggcgactttgccgttttataccggacaaatgcccaatcacggtcaattgaagaagcgtttgtcaaagccaacatgccatacaagatggtcggcgggcataagttctacgatcgtaaagaaatcaaggatatcttggcttacttacgcctagtcgtgaatgcgtctgattcaatgagttttgaacgggttgttaacagtccgaaacggggaattggccccggcactctcgaaaaattaacgcaattcgcggatgatcatcaatggtcattacttgaagcagcgcaaaatgcggaactctcaaccattccaggtaagagtcgcaagacgttgatcgattttggcaacgtcattggtgacttagcgaagatgcgcgaatttttaaacgtgacggaattaacggaacaattattggataagactggctacaaaaaagcgctcgaagttgaaaataccctcgaagcgcaaagtcgtttagaaaatattgaagaattactctcagttaccaaacaattcgacgaacattatgaaccagaagaagatgacagtgatttatttgtggacttcttagccgaattatcattggtctctgatttagattcagtcgaagaagaagccagtgaagtgaccatgatgaccttgcatgctgctaaaggacttgaattcccagttgttttcttgatggggatggaagaaggcatcttcccactatcacgtgctttattagaagaagacgaactggaagaagaacgccgtttggcatatgttgggattacccgtgctgaaagcaaattgtacttaaccaacgcttattcacggatgttatacggccgtcaacaaagtaaccaagcgtcccgatttgtcggcgaaatcgatgataaattattggattacgcaaatggcaatgctggcagtattccagaacgcaatgtgccatttggtaagagcaatcgttatgcacgcgcaacggctacaacgtataatgcaaataaaacaacgacgagtcacaagattgccgacacaactggcggcgataacagcggcgcttggacagccggccaaaaagtccaacacaagaagtggggcattggcacagttgtcaaggtcaacgggaccggcaacgaccaagaactagatatcgccttcaaagaacaaggcgttaaaagactactagcaagcttcgcaccaattgaaaaagtagaatagagtgcgtttccgacggttatcttctgaggattagcacagtgttgtgaatgaccgacaaagtcggtcgtttgcaatacgaagctaagcacaagagtcagctttaaaaagcacgtttcaaatcataagcagtgaggagtcttcattatgggattagctaaaccaatcgatcaatatacgcaaactgaagcggcagcggcggcccaagaactccgccagacattagctgaatacagcgaagcctattacacaaaggacgccccagtggttgaagatcacgtgtacgatgaattgtatcgcgacttagaaacgttagaagcggcctttccaatcattgttactaatgactcgcccactcaaaaagtcggtgatcaagttctgcctggctttaagaaagtgacgcatgaagtaccgatgttatcaatgggcgatgttttttctgaggaagaactcgcgacttttgataatcgacttcaaaaaaacgttgagcatgccatcgaatataatgtcgaattaaaaattgatggactcgcgattgacttgatctatgaaaaagggcaatttgtccgtggtgcgacgcgaggcaatgggacgattggggaggacattacccagaatcttaagaccatcaaggcgattccgcaaacattaaccaagccagtctctattgaggtccgtggtgaatgttacatgcccaaagcctcttttgcggcattaaatgaaaaacgggaagcagaaggccaaccgccatttgcaaacccgcggaatgcggctgctggtagtttacggcaattagatgccaaaatagcggctgagcggaatttgagtgcctttatgtacacgattgtcacctttgacgatgtgcaagcgacaacccagcacgaagcgcttgaagtgcttgcagaactcggctttaacgtcaatccaaccgctgaagtttgtcataatatgacagaggtaaagacctttatcgagcgctatcaagcaacgcgggatgacttagaatacggcatcgatggggttgtgttaaaagttaacgacttagctttacaacgccaactcggtaatacggttaaagtgccacggtgggagattgcttataaattcccgcctgaagaagcggcaaccattgttcgtgacatcgaatggacaattggtcggacaggggttgtcacgccaaccgctgtgatggatcctgtccagttggctggtacaacagtcgcgcgcgcctcattgcataacgctgatatgttacgtgataaagatgtccgtttgttggacacggttttattacacaaagcgggcgacatcattccagaaatttcacaagtagtactggctaaacggccggctgacagtcaaccgtatgtgattccgacagaatgtccttcgtgtggtcatgaattggttcatttggatgaagaagttgcattgcggtgtattaacccaatgtgtccggcacaagtgaaggaacagttaacgcattttgcttccagaaatgcgatgaatattgacggcttaggtccacggattattgcccaattattggatcaaggattggtccatgatgttgccgatttataccgcttaacggccgatcaacttgcgcaactggataagtttaaagaaaaatctattaataatttgttaaatgcaattgaagctagtcgccagaattcgctagaaaggttattatttggattagggattcgccatgttggtgccaaagcagcccgtttattagcggaacatttcttgacgatggaggctttgatggccagtgatcaagaagaaattatgtcggttgatacgattggcgagacgattgcggatagcttagcgacttattttgctgatgatcaagtacaaactttaattcgtgaattggctgaagtgcaagtcaacctgacctatactggggtgacaaaggcacaagctgaaaatagtgatagttactttaacggaaaaacggttgtcttgaccggtaaactatcgcaatatacccgcggtgagttgaaacaacaacttgaagataatggcgctaaagtgaccggctcagtttcgaaaaaaacagatattttgattgctggagaagatgccggcagtaaattaaccaaggcgcaagcattggagattccaattatcaacgaagcagacctagacagttatttggcgcaataagcgaatcaattaggacttataaggaggccattttcagtggcaaagtataaattatgggtagttgcagccgcaacggttttattgttggcaggttgtacaagtttacaaagcaattcgagttcgtcatcatcaactaagtcgactaaaaagctacaaacgaccgggaaagtgactgacagcatgtatgaaggggttattgataataaccaatacaagacaagtcagacacgtggattaaccacacaacaaagtaacacggcatttgatgtgaagagtttggaaagtggcttattaaacatttctaaaaaacaattccctactgataaatacctctaccaagaaggtcaaaccatcaaaacggcggaagcgcaaaaatggttggcacgtcaatcaaaagataatacacttggcttaaatccagaagataatggtgaaaaagaaccggataagcggaatccactgtatctccaacaaatcttagaacaagacttcttaggggcagatggtgcgcttgaagggatgagtattggtcttgggatgaatcaagtggattactataccaaggaacaatatggtgctacttttgaaaccaaaatttctagtgccatgatggcgcaacaaggtaaacaaatggccaataaggtcttaacgcgtttacggcagaaaaaaggtttgagtaagacaaccatcgtggtggggctttacaaacaagcacctaaggatagtttagtgggcggaaccttcttcgcttatggggtcagcaaaaacggtagtacaacgattgattcatggcacaaaatgaaccaagccaaccaagttttcccactcgttaatgatgaaaaagcggtcaatcaaagtgatgcggacgcgtttactagttttaaagaacaagtccaaaccttcttcccgaacttgagtggtgtcacggctcaagcacactatgaagatggtgtattggctgggatgaacatcaccgttaatacacaattctacagtgaaacagaaatcatgagtttcacacaatacattgcaaccgctgctgataaatatttaccacaaaatattccattagatatttcaatctcgtctgcagaggggatgcaagcttacgtaggccgagcagccggcagtaaaaggttctcaacccacgtattcgggagttattaattaaagagtgcgacaacagtcagttatgactgataggcaaaaaaatagcgtcgacaactaacgcagttgtcgacgctatttttttggacctttaaaagtcagtggttgtaattttaaaaataacagtgtacaatatgcgatattgttgttattttatttattacaccaaaggagagcatcatgaacgagtttaaaacagcacggaattggctagacaatgcggatgccgtcattattagtgctggtaacgggctatcaattacggaaggttacaatatttttgcacacgacgaagcgtttatgacccactttgggactttttatgaacgctacgggattatgaatattcttcaaggggctttttacaactatccaacagtggctgaaagagatgcattttacaaagtattgttcgattatatggttgatcactatgaaagtacacctgtctttcgcgatttaaagtagttggtgggcgatcatgaatactttgttgtcacatcaaatggcaacatgcattttcaactgagtggatttgacgaagaacggatttttgaagtggaaggtaattttggtaacaatcaaaatccaatgccgatgattcaaaagcaacaagctaagtttaacgcatttgttcaaaagtaccgttcacaaaacgtggtgattctggaattaggaattggtgctaataatcagttaattaaggcgctcctcatgcaattggtggcgcaaagtctaagttaccgttacatcacgttgaatttaccgcacgaaatcaatattcccgcagccattgaacaacggtcaatcggtcttgctggatcaatcgatgatcattttaaggagctcctcaaaaatgactaatttagactatcaagcaacactacaaaaaatggcaacgacgctcaaagaggcagattacgtcatcgtgggagccgcagccggcatgtcggctgcggctggtcccgattggtataatcccggcgatttatggggctttaagctgtctttaattcattttgttttacatgaaccagtttaccaaccgtatcaggacttgaaagccattttaaaggatagagactatgatttgataacgacgaatcaagacgtgcaattctcgaaagcttttccagataaagatgtcgccacgattcagggtgactggtcctattttcaatgtgccgataaatgtcatgattaagtctatcctaatcagacagttgttgatcaattatttccgcaaattgaaaatggccatttacccgaaaacttaattccgcagtgccttaaatgtggtgctgaaatgttggaatgggtccgtggttatgaatttcttgaaggtcagcactacaacaatcaatacgcaaagtatcgtcaatttattcaaaaagctgaaggtaaaaaaacggtctatttagaactaggtgtgggtatgatgacaccgatgtttattaaggaaccgtttatgaatctaacgtaccaaaatccacaagcaacatatatcaccgttaatcccaaagatgcgattgtgccacgtgaattaacggaccgcggtattgcagttaagtatgacttagtaaaggtactagcaaatctaaaagagtgcggcatcagccggatatccgctgaggattaacacagaatggtgaataaccgggttagcgattgtttgccattcagggttaaccggaagcggttggctgatagagcacgtttaaaagaaaagagtgcggcatcagccgggtatccgctgaggattaacacacaaaaaggttgggcaatttgcccaacctttttgtgtgttagttttcgtaaagttttaattctggattttcagtgagacgttgctgatattgttcgataatgtcggctagtttgatggcttgcatttgctgttcagcagtttcttggatttgatcgtaataggtagcaagcgataattgaatattttgtccggggccgcaactaggatcaatttgggtatcgatgttcaataaccgggtatcatcgacggctttatagatatcacagagcgaaatttggtcaggagctttcgttagtttgggttcggcatggcccttaacgctcgtcaataggccagctgtcttaagttgtcccatgatttggcgaataaaagaggggttagtattgatgcttttagcaatgcgctgactagaaaggttatcaaacgggtttaaagcaatcagggtcatcaggtggacggcattgcttaaacggactgattttttcatgatagactccttttaaaaagatgttattaagagtataacacctattgaggtgttctgctgtgatcaggctagccagagtctgccgtaaatgaaaattacatgaagggagttcagactggataccgataatacagcccgataattaattaagttgcttctatcagtaggtttgggttcttttatgagcatgaaataagttgtgaaatgtctattaaaattagacttatttttgaaaaatcattaagcaataaaaaaattcacccaaaattttgggtgaactcatcaaactttaatgaaattattttagcagtggagtggttataaacgtttaaaataggaaaaaaacaattctaaatagtttagtaacttctagtatgggtaaatccgtaagttacaccgacagactattgagtgttgcttttgaaactactcaaaactggggacgcttggttacgatacttgccgcttagctaatactgagtgttatttgttaagttggaaagccttagtgattaagtcttccaatgatgacatgatttgattgctagcccaatctgttgtgagttgtttgaaagcaattgctttttgatcgatgtcatgtttcttaggcattggtttgaagttttcggctggttggtcttcttcaactgctgtttcttcaaattgttcaggtgctacttccggtgcggctactgtttcgtcttgaacttctgcgggggcagttgtgcttcgtgagccatctgctgattcccagtagtgagttgtttgaccgccaattgtttcggtaacttctacaggttcgctgtcatcgatttctgtttgtaaccatgcttcttctaaagcggcttgttctgcggctgcttctttggctttagcggccattccaggtgttacaccagtgatagttacaccaaccgaagtggtcgctgctgaaacggtcgtactttgtaagacaatgccacccattaaacttaaaactactactgctacaaggtgttccgagatattgattttcatattataacactcatctataagttaatgataatcttgtacattattcacaacttcttatctgtactcagtatataagattaaacgaattcttatctatgataaactcttataaatcatatcgccttctaatgaattgcataacattcaattacgcttttaaaaagaaagtaaaaatatatttcaatatctgctgaaaccggtaaagattaggaaaaactggtaaattccaagggatgtcactttcttatacgttaatatatggtaaaattaatcagaatggataaaagtgacagaattagaagaggggtttactcatgattgataaaacacaagttcagcatgtcgcagaactttcaaaactagcttttagcgatgctgagttagaacaatttactgaacaacttgcagacatcatgaaaatgactgatgaattaaataaagttgatacaacgggtgtcccagtgacgacccacgtgaataaccttcaaaatattgtccgcgaagatgtggctcaagctggcacagatcgcgagattttaatgaagaatgcaccagattcagcggacggcttattgaaagtccctgccattatggataaggaggaagactagccgtgaactacttatatgaagatttacaaagtatccatgccaaattagtggctggtgacttaactgctagccaattggtaactgaaacagttgctgaaattgacaagagagaaccacaagttgatgcttttttagcaatcgatgaagctggtgcacaagctgcggctgccaaagtggacgcccaaccaattgatgcagataacttattagctgggatgccaattgggattaaagataacttattaacagatggcttaacaactactgctgccagcaagatgcttgaaaatttcacgccggtttttgatgcaacggttgttgaaaaattaaaagctaaagatgcaattgtgatcggtaaaaacaacatggatgaattcgcaatgggttcatcaacagaaacatcagccttcaagaagacaaagaacccttggaacttagacaaagtacctggtggttcatcaggtggttctgcagcagcagttgcggccggtgaagtcgttgcttctttagggacagatacgggtggctcaattcgccaaccagctgcatttaatgggattgtcggcatcaaaccaacatacggtcgtgtgtcacgctggggtgcgatcgcttttgcttcaagtcttgatcaagttggggtctttagtcggacagttgctgataatgcgactgttttacaagccatcagtggtcatgatgaaaaagatagtacgagtgctgatatcccagtgcctgatttccgtgccgctttaaatggtgacatcaaaggtatgaagattgctgttgccaaagaatacatggcagaaggtgtcgaaccaggcgttaaagcccaaatcgaaacagccattgaaactttgaaatcattaggggcaaccgttgacgaagtcagcttgccaaattctaagtatgccgtccaaacttactacattatggcttcaagtgaagcttcatctaacttgtcacgttttgacgggattcgttatggttatcgttcacctgaagccaagacacttgaagatgtgtatgttaaatcacgttctgaaggtttcggtgatgaagtgaaacggcggattatgttagggacgtttgccctttcatcaggcttttacgatgcttacttcaagaaggctggtcaagtgcggacattaatcgtgcgcgactttgaaaaagttttcgcagactacgacttagtggttggaccaacaacaccaaccaccgcttttgacttgggtcgcaaagtatcagatccagtgacaatgtatatgaacgatatcttaacaattcctgctaacatggctggcttaccagcaatgtcagtgcctgccggcttagtagatggcatgccagttggtttacaaattattgggaaagcatttgatgaagaatctgtttatcgcgcaggttatgcctttgaacaagcaactcaatttaacaagaacgttccaagcttcaaaggaggaaaagcctaatgaatttcgaaacaacaatcggacttgaagtgcatattgaattaaaaaccaattcaaaaatgtacagtccatctcctgtaaactatggtgcagaaccgaatactaacacgaatgtgattgactggggttatcctgggacattgccaaccttgaataaaggggcatacacacttgggatgatggttgcgactgccttgcacgctgatattgcgcgcgatacgcatttcgaccggaagaattacttctatccagataatccaaaagcttaccaaatcacacaatacgaacaaccccttggtaaagatggctatatcgaagtcgaagtcgatggccatacaaagcaaatcgggattgccgaattgcacgttgaagaagatgccgggaagaatacccatggctctgacggctattcatatgtcgatttaaaccgtcaagggactgccttgattgaaattgtttcaaaacctgatatgtcaacgcctgaagaagcctatgcttaccttgaaacgttacgccaaattgttcaatttactggcgcatctgacgttaagatggaagaaggttcaatgcgggtagatactaacatttctgtgcgaccaatcggtgcgaagcaatatggtgtgaaatcagaattgaagaacttgaactcctttaatcacgtccgtttggggttagcttatgaaatcaagcgtcaatcacaacttttgattgctggcgaaacagtgcgccctgaaacccgtcgttttgacgaaaaaacgggcgaaacattccttatgcgggttaagaccggtgcggatgactatcgttatttcccagaaccagatctaccaccattacacattggtgatgattggttacaagaagttcaagacaatatgcctgaaatgccggctaaacggcgtgcacgctatgtggatgaattgggcttgcctgaatacgatgcgggtgtcttgacgaacaccaaggaaatgtctgacttctttgaagcagctgttgctgatggcgccgcaccaaaacaagtttctaactggttgatgggtgaagtgaatgcttacttgaacgacaaacaaattgaccttcaagagacagccctcacacctgcccacttagcccaaatgatcaatttgattaaagacgggattatttcatcgaagattgctaagaaagtcttccaagaaattatccaaaatgacacggatccaaaagcctgggttgaagctaaaggcatggtccaattatcagaccctgctaagttgacaccaatcatcacaggtattttagatgacaaccaacaatcaattgacgatttcaagaacggtaaagaccgcgcagttgggttcttagtcggtaagattatgaaggaaacacggggtcaagctaatccgaaagttgtcaatgacttgttgatggccgaattgaacaaacgataattgatattttaggagattcgaatgcaaaaacgtgcacggttaatttataatccaacttcaggacatgaagtgatgaaacgtagtgtcgctgatattctggatattttagaacaagcgggttatgaagcgagtgcttttcaaacaacgcctgaagaagcttcagcgcaaaaagaggccacaagagcagcaaaggcggacttcgatttaatcgttgccgctggcggtgatgggacaattaatgaagtcgtcaacggcattgccggcttggaaaaacgcccaatgatggccgtcattccggctgggacaacaaacgattatgctcgggctttgaagattccgcgtgataatccggttgaagcagcccgcgtgattttgaagaaccaaacgcttaagatggatatcggtcaagccaatgacaattacttcatgaacattgctggtggtggtttgctaaccgaattgacctatgaagtcccctcagactttaagtcaatttttggctatctcgcgtatgtcgtaaaaggtgctgagatgttaccccaaattaaaccgattaagatgcatctggaatatgatgaaggtacgtatgatggggaagcttccctattcttactcggtttaaccaattcagttggtggatttgaacagattgcgccggatgcacaactgaatgatggtaatttctcattgattgtggttaagacagccaacatggccgaattagtccatttaatcgcactcgtcattaaaggtggcaaacacgttaatgatccacgggtcatttataccaagacgtcaaaactagttgcgcggcctagtgatgatgacgttaagatgatgattaatttagatggcgaatacggtggcgatgcaccaatgacctttactaacttgcaacaacatatcgagatgtatgtgaataaggaagatattccagatcacgctattacatcagaaacccctactcagcagtctgccgaagatttattcgtaaaggaagtcgaagcaatttctgaagaagacatagacggcgatggtaaaataggttaaactggaacattggataacgtgggcggattgaccgcacacttgtagctaagaaaagagtccgaagcaaaactcagttttgtctcagactctttttacacaattaaaaagaggtaactatgaaaatacaagcacctgtaagaaaaaatgaaacattgacggttgatattatggatttaacctatgaaggcatgggggtcgctaaagtcgacaactatccgttgtttatcgaaggcgttttgcccgatgaacaagcagaaatccaagtcacaaaggtcaataaacaatatggttttgcgcgcttagttaatttattgaagaaaagcccagaccgcgttgaatcaaaagctaacatttactcacaaactgggattgcgccattacaacacttggcatacccagcccaattagatttcaagcgtaaccaagtcttgaacgtcttccaaaaagcccatttagatattccagtgcaacctgttttagggatggatgatccaacgggttaccggaacaaggcgcaagttcctgttcggtttatcgatggtgctttaacaactggtttctaccggaaacacagtcatcaagtgatgccaatggaagacttctacattcaagatcctaagattgatgaagctatcaaggtcattcgtgatatcttgcgtcgtttctacattgatccatacaacgaagatacgcataagggtgttttgaagaccattatggttcgccgcggttattacagccacgaaatgatgattgtcttcatcacgcggagtaagaaattaccggctgcccgtgaaatcgccgttgaaatcaaaaaagctttaccagaagtggtcagcatcatgcaaaacgtcaatgctgctcaaacgaacgtcatctttggtgacgaaacaaaattaatcgctggccgcgactttattcgtgatgaattaatgggcttgaagttcgaaatttcagcgcaatcattctaccaagtgaacccagtgcaaacggaagtcttgtataacaaggcaatcgaagctgctgaattaacggggaacgaaacagtcattgatgcttattcagggattgggacgatttcattagcagtcgctaaacatgctaagcaagtttacggtgttgaagttgttgaatcagctgttatggatgcgcggcacaatgccaagattaacggcatcgaaaacgttgaatttacactcggtaaagccgaagaagtgatggcgcaatggcaagcagatgacttaaaagtcgatgctttgattgttgacccaccacgtaaagggttggaagctagcttcatcgaagccgttggtcaattaaaaccagccaagatggtctatgtcagctgtaatccagcaacgttggcgcgtgatttagaactattggcagcccaaggctaccaagcagaaagcacacaaccagtcgacatgttcccacaaacgctacacgtcgaaagtgtcactaaattagtattaaaataaagtgcgtttgtggcggttaacttctgagtatagcctaggctggcgaataaccaacaagttggtgatttgacagacgtagctagacggaagaagttgccacaaaaagcacgtttcaaaataaagtgcgtttgtggcggttaacttctgagtatagcctaggctggcgaataaccaacaagttggtgatttgacagacgtagctagacggaagaagttgccacaaaaagcacgtttcaaaataaagtgcgtttgtggcggttaacttctgagtatagcctaatcaggcgaattaccaacaaagttggtgatttgactgatgtagctaaccggaagaagatggcttatggcgcacgttttagcgggtcgttattatccagagatggaaagtagcgacccgttttttgcgttcagacgtgcatttaagcggaaggtcggctagaatgaaattatcaaaacatgtttagagggttaacgcatgaatgtcaaaaaacaatctataatgatgcgcttagcgcaacattttaaccgattccaatccgcggcggtctatcagattatgcagcgaagtttaacgttgttatttccatttgtcttgattgggagtatcagccaactcatccagctagcactttttaaccggaatagttttgttgtgaatgtatttcatctttcgaattggttgagtaaacggaatatctttcagatgatgtttgacagcattacgagtttgacgttaggaatcgttgcggcattagcagcgatgtgtgcggcgcgctatacagccaaacactataagcgtgatgaacaattagccagcattacggggctcattgcctatttaatcttagcgttacggttgacgccaaatgagggcttatctttcaatagccagatgttgggaatggggggcttattttttggcctattagtcggctatctgactggattagccttcaaaaaattaggacgacctcatcggcgtgatttaccgctgaatgggtcagcagtaggacgttcattggattctatgtgggcgattttattggtgctcggcgtcattttagggctgagtatcctgctaaattggttggcgatttcaatcttgccagatcaagtcatcttacgattacaatcactaaaagcaaatcaaacgggtctgcttttcacgttggggactggtttagcggccactagcttaactttttttggattaacgagtatgccaacattggcccaatttgggcgtgagggaatcgcatcttcggccaacttaaactatgcgtttagtcatcacacggcttggcacgttccatatccgttcacgttagggactttgtatgaaccctttggtgcgattggcgggacgggtgggacattagccttagtgattgccgttttcatcttcagcaaacaaagggattatcatttgattggtcgatggtcgctgttgcccgttttatttaactttaatagcgcggtccttgtgggaatgcctgtcattggaaatggcttgtatgtgattccattcttattggtaccactggtaaatatggggattgcatcggcagcagttgcattgaatctcatgccgtcggtagtcttcacggttccacttgggacccccggcttattgcaagcgttcatgggcaccaacggtgatttagtcgcgctggcggtgacggtattaaacgttgtcgtcggcgtgatgatctacaagccgtttgtccaattggcagatcaattagcactcgtaaaggaggcggcataaattggccaaattaagaaaaaaaagcctctggttgttagtcattagtttggccttgatcggcggattaatgtggccagctgctcaatggagtcgccagagcgtgatgaccttagctaagcgccatgattcacgaatgtcaccggtaatttttattccagggagtagtgcaacccaaaatcggtttgatgaattagtggctaaattgaacgctaaccgcgggaatcggcacagcttgttaaaactaactgtgcatgaaaataatcagattagctattcaggggaaattaaaccgcgggataatgaaccgtttatcgtggttggttttgaaaacaataaggacggttatagtaatattcaaaagcaagctaaatggttttcgctcgcatttaccgcgttgactaagaagtatcaatttaataactttaaagcggttggccattctaatggcggcttaatttatacagcttttttggaagattattttaatcgcgatgatattacagtgaagaagttgatgacgattggttcgccgtataacttttccgaaacatcgattacgcataagtcacagatgctgacggatttcattaagaaacgtaaaaatattccgacgaacttatcgatgtattcaattgcgggaacggaaaactttgaaaatgatgggattgtacccgcgcgtagtgtagaggcggggaagtacatttatcaagggcaagtcaagcactacaccgaaattacggtgacaggtgaccaagcacaacactctgatctaccacagaatcaacagattgtggccttgttagaacaatacattctcagcaaaaagaacacccgcaatacacaaccaacacctaaggattcaacaccttcagaggaccaataaaaaaagccccagaataacagtaaggttgttattctggggccttttttattggcattcattaattagaatgcttggtactttctttttgaactagagcaccaattgctggcaaattacccaagctatcgattgacttatttggcaagacaatggtgttattttgaccgtctgcgatgtgttccatcgcttcaatattcttatattgaagatagagttcgccgttattgactaagctggcattgatcaaattaatttgatctttaacagcttcggcaattgttcgttcactttgagctttcccttcagcttccaaaatttgtgtttgtttattggcttcggcttctagaatattcgcttcttttaacccttcagctttacgaattgcggcggctttgagcccttcggcttccataatgttggcttctttttcacgcgaagcacggagcaatttattcattgattcttggatgtcgtgggccacttgaattgaatcgatattgacccgatcaacgtttaagccgtagccggctgttacttcgctaagttgttcaaaaagggtttggttaattttttcggtgccatttaaaacatcgttcaagtccatgttcccaataatcccacgtaattgtgcacgggtgtcttggaccatacttagaacggaatctttatttttataaacgtacgcattgacgtcagtgatgtgatatttaatcgtttccgaaatcataacaaccacgttgtctttggtaatgacttcttgttcagcgacttttaaggggatttgtttcatattaacgatttctgtgatgtgataaatgaatggaatgaccaaatggaaaccaggatcaagcgttttaacgtagacccctaagcgttccaaaatcccaacttccccggtatgaatcaaagcaaatgatgaaaagagggtgactgcaacaatcactaaaacaagaatgactaaaatactgatgaaaatacccataataaaaactcccttttgtctggcttaatacgtcagaatattgtggtgcgctgtcacgattaaagctaaaggtgtgacggccgttaccatgacgagtaagccagcgctagctggtccttcgacacggtaatgatataagatgccaaaaaaattaacggtgccggttgatttagcatcctgtaaagtaaacgttaaccccactaagcgttcatctaacatattccgcctccctttgttcacattgtatctgattaccaataaaaggcaactctaagtgacagtaacgaacaaaattgttaggtggcttgtctcgaatgcatgaagatagtaaactaagcgtactaaggctggaaatggaggaaccgtggatgagacgaaaagtgacaccgatttttcaagacagtttccaaaagcgctattggcgacaaataattatcggcattatcgcggtagctctgtgtcttggtggtgctatctggtggttgaaacaccgttcggatcgaccaagcgcgacgcaatatccgattctagggatgcaattaagtcagtcagatggttaccaagattttgacgggttaaaaaaggacggtattcagtttgtttatttaaaagcaactgaaggggccagttacaaggatgataatttcgacaccaattacagtcgagcaagtggcactggcttacgcgtgggcatctttcatttttttagttttgatagttcgcctgaacgccaagctgaccaactttttaaagcagttggcagccagacgggtgatttaccaattatgatctatttggattattataacgactatgcacaacaaccgcccgcacaaaagaaaacgcaaatggcactggcgcagctagtgaccttgattaatcaacattatcatcaaaattgtctcattggtggtgcacccagcttattaaaacggtatgtgccacacaaaggagactatccattgtggcaaactacgcgggaacagccaacattggcgactaagaacgggttctggcaatacacaatggctagtcagattccaaacagtgataatcagacgaactatcagttagcagtttttactggcaccaagcaacaatggcagactattaaatagaaacggagagaaaataatgattaaacacaaaggctggttattattaatcgcaatcgtggtggttttcatcggtggtagttggggaattcatagctattattacggtggggaagcctactatacacagattgtttcaaacggaacacgaatggaagaaaaggattcagcaggggaaacggttatcgattataactatcaacaagcagcctacaatgaagatggtgttaccaaaaaagttgattttaatggtaataaatcaacgccgcttaaacgaaatgcgtacctcaaattaatcgtcaataaaaataagggtgtggtttcatgggaaaaggttgccaaaaacgaagtcccagataaagctcaaaaaatgttgaacaaataaagaataactaaaaaggcccataacgctgagcattatgggccttttttaatagctattcgattggataatccatatcttcggcttcatcgtaaattgaaacgggccgttgattttcacaagtaatttttaattgatagccgtagtgatcgagaaagaccaattcgttttccgtgagggaaatgacttgaccactcaatggcttatgatcgatttgcaccaacaagttcggagtaatttctaatgtgtgtttttttcgggtttggttgtcattaaaagaccagtgtccagcataaaaagtcgctactttactcgcttgagtcgtccgaactttttgctgatactggtgaatggtttgatttaaaattgcttgtggtttttgaaatttaaaaaatcgcataagtcacaccccaacttactattattctaccacgaaatagttagtttgcggacaattaattatcggacttacgactgtttttttaaggaatggttaaagaagtgaatagtggcggaattcttatcagtagaaaaacttttcgataggcttctagatctaaatcccgtatactggcagtattaaataagggagctgattataatgcaaacacttgggattattgggactaactggattacgggacaatttgttgatgcggcccgggaatctgaatcatttaagttaacagctgtttattcacggacggcagataaagccgaccaatttaaaacgaagtatcacgcaccagaagccacaagttacactgacttagacgggtttatgaatgccaatgaatttgaaaccgtctacattgcatcacctaatagtctgcactttgaacaagcgaagcaagcaattttagcgggtaaaaatgtcatcgtggaaaaacctgccttcagtaatccggctgaaatggcagccatgcaaacattattaaagcaacatccagaccaattcttattcgaagcagcacgtcatattcatgaggccaactttaagattgtacaacaagccatcaacgcattaccggcgatcaatggcgcgaccttgagctatatgaaatattcatcacgctatgacgctgttttagcgggtgaagaaccgaatattttctcaccacatttttctggaggagctttacaagatctcggcgtgtatgtcgtctatgatgccgtcagctggtttggtgtgcccgattcagtcgattatcaagctgaattgttaccaactggagtggatggtaaaggggtcgcaacactgcgttatccaacctttaacgtcacgttgatttttggcaaaaccgttgattcctatctaacgtctgaaatttatggtggccaaacgacgattgtcctcgataatgccggcacaatcggcagtgttgaccgctacagcgaaggtgggcaaaagattgagtcactaggggaacaatcacttgctaatccaatggttgctgaggcagaaaatttcgcggcgatgattgctaatcgtgacacaaaacggtatcatgaattattacagctaagtgaatcggtcaaccaagttttatatcaattaagacagtcggccggaataacatttgatgcagattaacatgacggaggcaatacatgagcgtttcaccactatttcaagcactatgggatgagcaaggatttacagaaatgtcacccatccaagaggcagtttatcaaccactgaaaaaagaccaatcaattctaggactggcacccacgggttctgggaaaaccctcgcgttttcattgccgttattagaaaaaattatgccgggcgaagggctacaagtcttaattttggccccttcacaggaattggtgatccaaacacgggacgtcattcaaccttatgccaaggcaatcgactgtaatgtccaagcgattacggggaaggcgaatgttaaacgccaaatcgaacggcttaaggccaaaccagagattatcgtggcaacgactggtcggttattagaattgagcgaacaacggaaagtgaaattccatacactccaagcgattattatggacgaagctgacgaattattgacggatagcgggctttcagaaacccgccatatcgtgcaagaatcacctgccgatgtgcaacttggcttcttttcagcgacatcaaccgatatcttattagagttggaaacatggttcggcgtgccaatcgaaacaatcgacgtgcgtgggattgataagacgggtggggaagtgttgcatgcatttatcccaactggtaacgctcaaaaagtgaacgtcttacgccatttagcacatcaaaagaattttagaggattggtcatttttaaccaatccgcgcaactcttacaagctgcacaaacgttaaaacatcaaaaagtaacgtatgccgcactctcagggcaaggtcgccaaacagaacgccaaaaagcgctcaaagatttccgtgaaggtaagattcaactcttactagcaacggacgtggctggccgtggcttggatatcaccgacttaccttatgtgattaattttgatgtaccaaacgcaaaaatcacttacattcatcgtgctggtcggactggtcggatgggacgcacggggactgttttgacgttgggcaatcaacacgatgggcggaatttgcgtaagttattggcgcctgaatatgatcttgtgacccgttatttggttggtgatcatttggaagccgaaaaaccagtgacgcctaaagtagcaccagttgctgcaacgaaagcaacatctgctgtaccaactactggtgaagcaacagaaggacaagtgcaaaaggctacgccgacgacaagcgcgcgcaaagccaaattagtaccagttcgccaacagccagctgcaccattaaaaccaaaacataagaaaaaccgtaaacgaaatcaaaagaataagggctaccataagaaaaataatgactagtggtctaatctagattgagcgagaaaccttaacaacctgttaaggtttcttttttttggactagtccgtttgtgaaaaggttatcagtaattaattgacaaatctcaggaagcgattacaatataagtaagggttttctttcgcttcgtaaaatgcgatagtggcgaactctcacaatcaggaactaatttttgaaagccttttaatggattggttagtcattctcgaagaaatatctagaccaattaatgaatggttacgaaagtggttcacgatgagatgatcataggaggtgccatactatggcagaagaacagaacttagaagcaatcatgggcttaattatcaacggtgggaacgccaagagtagctcaatggaagcaatcatggccgctaagaaaggtgacttcgaaacagcagctgccaaacttgcagaagcggatgctgctttatcagaagcccataattcacaaacagatatgttaaccaaagaagcaagtggcgatcacatgcaagtgacattattgacggttcactcacaagatcacttgatgaacgcaattactttccgcgatttagcaggcgaagtcgttgacgtttacaagaagatggccggtgtaccagtcgattaaagtttggctaatgaacaaaagggctaggacaaaatgacttttgttcgagccctttttagttaaaagcaacaaatggcacattgaagagaagagtgggaacgggatggaaattaaattaaatttaaaaataccagctagttatttttatcagaagattctggaatcagtgttgtttgatattaagcaacaaactggggataaactaactgaagcgcagttgcctaattattcgtacgacaagcaatttggcaagaatcgggcgacactgaagattacgcaactgattaaagatcagagttatcactacgaaacgacttctacccaggggagctatcaatcaagttacgatattttcgcgaatggaccgcagtctattgaagttatctatcgcgaaaatgccaaagtaaatggcaaattacaacaaaccaatgatatattgatggcctttgtcatgggtttcatgcgtaaacgcggctttaagaaaatgttgaaacaaatcgaaaaagcatatcaagcagaacaataagcaatgactttgagagaaagtaggatgaccagtaatggaataccatcaattagcaccatttcctaaagattttttgtggggttcagcttctgcagcctatcaaattgaaggggcctaccaagaagatggtaagggccggtctgtgtgggatgaatttgtccgcattccaggcaaaacgttcaaagccacgaatggtgatgtagcggtggatcactatcaccgtttcgaagaagacgtggcgctaatggcacgcgctgggctcaaagcctatcgtttttcgatttcatggccacgggtcttaccaaatggtaaaggcgctgtgaatgaggcgggcttagccttttatgatcgtttaattaatacattaattgccaatgatattgaaccaatcgtgacgatttatcattgggacttaccgcaagcgttgcaagccgaatatggcggttgggaatcgcgtcaaattattgaagattttaccaactacgcaggcttattgttcgaacgcttcggcgatcgtgtgcaacattgggttaccttgaacgaacaaaatgtcttcatcactcacggctatttaacagcggagcatccgccagcagtgactgatgctaagcgaacttatcaagctaatcatatggcaaaccttgccaatgctagtgcgattaaattattccatgaaaaaggctatcaagggggcatcggacctagttttgcctacagcccaacttatgcgctgaatgcggacccagaaaatcaaattgcggctgataatgccgaacaaattaacgctgatttgtggatggacgtttatgcttggggccgttatccgaaattagtgatgacttatctcgaacgaaacgggattgcacccgaaattactgaagcggaccaagctttattagccgatccactcgcacatcccgattttatggggttgaattactatcagacgatgacggttacgactaatccattagaaggtggcgttggcttgaccaagcaaaatacttccggtaaaaagggcactagccaagcaagtgggttgccaggcgtctataagaccgctgataacccctatatgcaacaaactgactgggattggaatattgaccccgaaggacttcgaatcgcactcagacgtattgagagccgttatggactgccggtcttaattactgagaacggtttaggggcttatgacaccttgaaagaaggcgggcaagtgcacgacgactaccggattgcctttttaaaggcgcacgttcaagccatccacgaagctattaccgatggcgtttcggtcatcggttacacgacatggagcttcacagatttattaagttggacaaacggctatcaaaaacgctatggcttcgtctacgtggatcgcgacgaaacagaagaaagagaactaaaccgctatccaaaagacagtttctactggtaccaaaaagtcattaaaagcaacggggaaatactatagagtgcgcagtcgaacgggttggctttgaggattaacagaaaaatacatattatggcgggtttaagccatagtatgtatttttaggttaaccggaaaaggcagttcgaagcagcacgtttaaaacaagagtgcgcagtcgaacgggttggctttgaggattggctcctatgatggaattacggacaaactgttcgatataatacatcataaaggagctttttattatggcaattaaatattcaaatgaatttaaagaatcgattgttagcttaagtcagactggccgttcggccaactcactggctaaagaatacaacgtcagtgtttcaacggtcactaagtggattaaacaagctgatcctaacaacactaaagtgctatcatcaaatgaacgtgctctgattaaagaaaataaacggttaaaagaagaacttgatattttaaaacgagcggcggtgctcatggcaaaaagctaattattaaagggcgtgccctcgtgttagaagtcgtcaacgctaatttacttgctgggcaccgcattacgcgtatcttatcagtactcaaaattccgcgctcaacctactatgattatctacattggcagccaagtagaactgaacgccgccggcatttaattaaacaagaagtgttaacggcttggttaagatatccaatgtatggctacccacgattaacgatcttactaaatcaacagtctgatattcacgttagtcagcgtctggtctatcaacaaatgtgtgaattagggattagatctagaatggttaaacgaatcaataagccaaccactcagactgattatgatcagcgaccaaacttgattaagcagttaactgatcaatctggtattttattgactgatattacgtacattccccttaaccatacttggtgttacctagctagtgtctataatccagtaacccgacgggttattgcttaccaacttaatacgcagatgactaaagaactagcgactaacgttattacccaagtcatggcgcaagcagttaaaccacaaattattcatagtgatatgggaagccaatacacaagtgacttatttgaaaacactttatcgaagtatggtatcaagcattcttactcccgaaagggtcagcccggcgataacgcgcgaattgaaagttttcattcaattttgaaacgtgaatacgttaatttccaagattttaagacaattcatgaagcaatcgccggaattgataactatattcgttggtataacagtgatcgtatttcacttgtagcgtagctacaggctattaaattcaataatgttggggcttatttaatatactctaaagcgtttttaaaatctgaacgggactaaaacttcggcctccgaaaattaaattaagtaatttaaattgaaagtcaaatttgttcgtacttttatgtccggattcttgacataggagccattaacagaaaaacgagttcgtttcatcccccactttctttttgcctttagaacgcttagaatatagcgtaagaaatcaagacgaggtggcaatatgacaacgcaagaacgacgtacagcaattctgaatgcaattcaaaagagtgcgcaacccatcagtgccaaagtattagcgcaacaatataaagttagccggcagacaattgttggggatatcgccttacttcgcgcacaaggggcccaaattattgcgacagttagcggttattacgaccaaacgcagacgcaacaaacaatgccatatcaggcacaagttgcctgtcagcataatcaggggcagactgaactcgaattgacaacgattgttgaaaatggggggcgcgtgatcgacgtgaccgttgatcatccattgtatggtgaactgaccggtcaactgggaatcggcaccttgacagatgtcaaatgctttatgcaaaaaatggccacaatgccccatcagaaattactttcaacattaaccgacggcattcatttacacacgattgaatgcgcgtcagaacaacgatttaagcaaattgtcgcagcgcttaaacagataaatatttattataatgcataattaggtgtcttgacatctgtaaactctttttgtatgataggaccattcataacataagggagtaatgcgggatgacaaaagaacataggacacttttatgggctgcaggtggtgcatggttgttcgatgcaatggatgtggggatgctatcgtttgtgattgctgcgcttgccaaagagtggcaactcagtagcgcacaaatgggattaattgggagtgtcagttcaattggaatggtttttggcgccgttattttcggcattttagctgataaaattggtcgaaaaaacagtttactttgttccttattagtattttcgattggcaatgggatatctgcctttagtacatcgttgagtctatttctagtacttcggttattggtcggtgctgggttgggtggcgagctaccggtagcctcgacattaatctcggagaatacgccaacggcatcgcgcggtcgggctgtcgtattgttagaaagtttttgggcagccgggtggttagttgccagtttactcgcctattttgtcattccagtttggggctggcgagtggtcttattgatcacgtcattgcccgccatctacacacttgtgttacggaaacatgttaaacaagagcatgaaccgacgacgattaaccgtaaggtaccattcatgcaacgattgcgtgttttatttgaaccagcgtatcgccaaagaacaattatgttatggctcgtatggtttttagtggtcttttcatactatgggatgtttttatggctccccagtgtgatggtcttaaaagggttcagcttggttaaaagttttgaatatgtgctgattatgaccttggcacaattaccaggctactttgtagcagcatggttgattgaaaaatgggggcggaaacgtgttttaggtggctttctaatcggaacagcactcagtgcattattgtttggcaatgcaaactcagttgccatgttactcgtggccggtgcgctgttatcctttttcaatcttggtgcatggggggcgctatatgcttataccccagaacaatatcctgcacttgtccgtggaagtgggagtggtttagcagctggcatcgggcgaattggcggtgtggttgggccatttttagttggtgcgctaattcagcagggggtatcagtagccgtgatttttacactttttacgggtgcgatactattagcggctggtgccgtgttctttttaggtcaagaaacgatgaacgccgttttaacggatgaataaagatttattaaaatcaactttacaattaaaacaacagatgcgacaatatgactcataggcgctcgtggctcaactggatagagcaatcgcctcctaagcgataggttgcgagttcgattctcgccgggcgcactttgaagcaattgtcgtaaaagcacactagattaactagtgtgctttttaattggtgtaaaataatcaagcggaatgattacgctttcactttcagaaagttacggatttatgatttatattaggtgaaaatatgttaaaatagattcgtattcaaaaatcgcaacgcaaaagttgcaattaatctggaggctttttcatgtcattagttaatggtacagaaatctttaaagctgctcgtgaaggtcattacgctgttggtgctttcaacacaaacaaccttgaatggacacgtgctatcttaggtgctgctcaagaaactaacacaccaatcttgatccaaacatcaatgggtgctgctaaatatatgggtggttacgaattatgcaagaacttggttgaacaaacaatcaagtcaatgaacatcacagttcctgttatcatgcatttagatcacggtaactacgaagctgctaaagaatgtatcgaagttggttacaactcagttatgttcgatggtcatgatttaccattcgaagaaaacttagcaaagacaaaagaaatcgttgctttagcacatgctaaaggcatctcagttgaagccgaagttggttcaattggtggcgaagaagacggtatcatcggtgctggcgaattagctgacgttgaagaagctaaacaattagcagctgctggtcctgactacttagcagttggtattggtaatattcatggtgtataccctgaaaactggcaaggtttaagctttgaccgtttacaagaattagctgacgttattgacttaccacttgtattacatggtggttcaggtattcctaaggaacaaatccttaaagcaatcgaaatgggtatctcaaaagttaacgttaatacagaacaacaaatcgcatggtcaaacgctgttaaagaatactatgcagaaaacaaagatcaagctgaaaaaggcttcgatcctcgtaaagttcttgcaccaggtacaaaagcaatcaaagacacagttgaatcacgtatcgaatggttcggtacaccagctgttaaataattattgttttttcaagagtccaacttcggttgggctttttttgtggtttcatgctagaatgagagcaaaataaaggtggggataagatgacagttattgagcaatataatgcaggccttacaactgatgctgatcgaacactcgcactggcaatgcacaccattcttcgggcagtgttaccggacgcagaaatgaagctggcttatggtttggttgggtattatcagcctaaagcagtttgctattttggcattaataaacggcacattgggttttatcccactaatcaaccgatggcccattttgcaaaagctgtcgcaccatgtcagaccggcaaagggacactacaattcgaaaaagatgtaacggcattaccaatcgagttgattcaaactatcgcgagttagcaattagaacacgttaataaataaggcttacccaaaatgggtaagcctattttttaatgaccactcgtcattttaatgccgagaattccgattactaataaaataacgaatagccaggttaataaagaaatgtgttcattgaataagatgatgccgactaaaatagctcccactgcgccaattccggtccaaaccggataagcaatgctcaatggtaatcccttcgtcgcacgaattagaaaaccgaagctgacgagcatgccagcaatcgtcagtaatgtgtaattgagcttagtgaacccaccactcattttcatagtcgttgcccaccaaacttctgccaatcttgcaatcaataaatcaacccatgccacacaatagaacctcctaataatatcggccacaaaaaaaggacagccaatcacttcttctttgacctaatgaagtgattaactgccccgtggcgacgattaaattaaatatagcatagcaaattttaggttaaaagtgaagcttagccgatagaaccaccaattaaataggtgacgaccatggttaagacgccggttaagacgttgcgtaaaacgcctttgagtcggtttgccttgcctaacgttgcactcgtgtaaccggtcgcgataagggcaagaacaattgaaccgatagttccactgactttgtaagggtatggaattgctaggatggcgatgattggcagcaatgagcctaacatgaatgagaaaaatgatgaaaaggcggcatgccacgggttgaagtaatggtgtaattcaatattgtatttttcgcggagtgtgatgtcaagactgtctttttgcatgaacgctgaagctacctgatgtgcaagtggagtgggtaagccttttgattcgtaagtccgttgtagactggccacttcagcagcgtattcgttttggatggcttctttttgaagccgcatcatggatttctgcgtatcacgttgcgtgctgaccgagacgtattcaccgccacccattgaaaaggcgccagcaagcatgccagaaataccagcaagaaaaatcgtgtactgactttggtgggcgctcgcgacaccgactacgattccagctacagagataatgccatcatttgcacctaagacgccggcgcggataatgttcaaacgttctgataaatggaaacgatgttcgagtggtgcactggcggataattctttcataatggcggactcctctggttgatttaacttcattatagctaattgagaaggattatcaatcgtttttgaacaattgttcaaaacaaaaacattgtataaaacctgttataccagtacatacgaatcattattactaacgaataatgatatagtgaacaaaaagtatgccaacagtctagcacatcaaaaagggtcgcaacaaaaattttgtcgcgaccctttcgaattataaatgtgtcagtgcttggtagtagaagaatgccgtgattgcggttaagactaaaccggcaacgcacacaatgattagaccaccaatcgcttgtttctggtaggcgctataggcggttagtccaatgaagaaggtggttagacaaacgcagacgccaaggagcatgagccatgtaatcattagtcagcccagtcaccgtttctgaaaatggggacaatctgaccgtcgtgcgttaagccatcgatgttcatttgactggaaccgaccatgaagtcaacgtgggcttgactacggtttaaaccagctgcttttaattcctcttcagacatatctgtgccgccttcaattgaaaaggcgtaagcagagccgagtgccaaatggtttgaagcattttcgtcaaataaggtattgtagaaggtgatctttgattgtgaaattggtgaaggatctggtacaagtgcgacttcacctaggctcttgaccccagcatcggtttgtaagagtttttgtaagacatcgttgccttcttcagcggtggctttgaccactttaccgttttcaaaagtaaattgcatgttgttgagtgtgttaccagcgtaactcaatggtttcgtagaagaaatgtagccatcgatgttgttggcatcagctgctgagaaaacttcctcagtaggcatgttagcgacgaatgaacgaccatcactactacggctaggaccacccatccagatgtggttttcaggtaacccaattgtgagatcagtgccaggggctgtgtaatggagtgctttgtattgcgcagcgtttaattcagcggctttggcttgcagtttcttaccatgttgttcccaagcaaggattgggtcttctttatctactcgggttgttttgaaaatctctgtccataacttatcagttgcggcttgttcgtccatatcaggaaagactttctttgcccaagcgggactagctgcggcaattacaatccaactatttttgttggcttgtgttgcttggcgaactttaagcattgcttgaccgtttgccttttgaacagcagcgacccgatcaccatcgagacccttaaggttatcaggatcgctcgacatcaccgaaatccgtttggcgttgtttgctaaccagtaatcgtattcttgtttttggaagtctggcacgttaacgaggcgatcttcggctttgtgttgcatattgattcgatcgatgtcgtcatcttgccatttgataatcacttcggctgcaccgaggtcataacaagcagctgtcatatcacgggcgaattcagcttgatcaacagcgatttgtaaaaccactgtatcaccaggttggacgttaattcctgttttagcgactaaagcggcgtatttttcaagattatgttggaaagtagtcatcaaaaattcctccttaagggcgatttaatatgtttatcatagcacatggcgatttaaaaaactcgtaaaacagataaaaacgttttcatgttatttaattttgtggtagagtgacagtagataatattgaaaaacggattgatcggttaaggagtgggaacgatggcacggacaaaacggattaaagcggagcaaattctggataaagcatacgaaatggtattagcggatggtttaaaagcaattacagcgcgcagccttgccaaggcactagactgttcgacacaacccatctatttagaattcggtaatatggccaatctcaagcaagccattttggaacaagccaaggcgcgtttggtgtggtatgtcagtgaagaacaacgaacagatgatgccttagtcaatctcgggattggctatattcattttgctacaatcgaaccagaactttaccgtgcgttatttattgataaccactttggtaaggatgaagcacaacttttcatggggcaactgacgcaaactagattgcaggactatcaaccgttaaaaacggttagtgagtcagaacacgaacgcattattaacgaagcgtggatcattattacgggtttggcgaccctaacgaatgcgaagttggtacactatagtgacgcagaaatagacgcgatgctcaaacgaatgttgaagcaatgtttttaaaaagagacgcctaaaaaggcgtccttttttatattcagactgttattcatttgtaaggtggttaaagattggcaaatctttagaaaatatgtagtataggggggtaacttattaaataataggaggcagctttgtgtctaaaattaaagtaatgactgtttttgggacacgaccagaagcaattaagatggcgccgctagtattagcattgaaagaacgcgcagatgaattcgaagctgtgacagtggtaactgcccaacatcgtcaaatgttagatcaagtacttgaaatctttaagattaaacctgattacgatttagacgttatgaaacaacggcaaacacttagtgaaattactagcaacgtattaatgaaccttgataaagtgattgcaactgaaaaaccggatatcgtattagtccatggggatacaaccactactttcgcagcaagcatcagtgcattctacaatcaaacagcgattggccatattgaagcaggactaagaacttgagataagtattcaccattcccagaagaaatgaatcgccaattaacagatgtactcagtgatctttattttgcactaaccagtcaaagtgaagccaacttattacaagaaaatcacccacaaaaggctatttacattacagggaatacagcaattgatgcattgaaacaaacggttcaaagcgactacaatcattcaatcttggatgttgttgatgctgacaaacgaatgattctagtaacaatgcatcgacgtgaaaaccaaggtgaaccaatgaaacgggtcttcaaggtaatgcgccaagttgttgaaacccatgatgatgttgaaatcgtctatccagtgcatttgaaccctgttgtgcaagaagaagcaccgtcattaggcaaacctgtgttggtcttacgggatacaactgaacgacctgaaggggttgaagcaggcacgttgaagttggttgggacacaaccagaacaagttcatgatgccatggttgaattattagatgatcaagccgtatatgaagcaatggcccatgccaagaatccatatggtgatggacaagcatctcaacggattttagatgcaattgcttatcattttggccaatcaaaagaaaaaccagaagcgtttaaataatgagcattgaaaaagccctcgaccattatcattttgactgataatggcaagggctttttttgatgagataaacgtgcggattcaaactgttttttgtcgtaatactcagttgctaagtgcaaccaaacgcactctatttcttttctttcacgatatacactggtctgtttttaacttctaggtagattttgccgatgtatttgccgacaatccctaggcataggagttgtaaaccgccgaccattaggataactgaaatgagtgatggccaaccgcttgttggatcgccaaaaatcaaagcgcgaataacgatgaagattaatgcaagcagggcaatcacgaatgagaaaaagccgacgaaggacgcaatggctaatggtgtttctgagaaagttacaatcccatccaatgaatatttgaagagtccccagaatgaccaactggtttgaccagcaacgcggtcttggttcttatattctaagtacttggtgtcaaagccgacccaactgaaaatcccttttgaaaaacggttgtattcagacatctctaagatggcattgaccatctgccgagtcatcaagcgataatcacgagcaccatccacgatttcagtttgtgaaatccggttgataatcttgtaaaattgtttagcgaagaacgaacgaacggggggttcacccgcacgtgttgtccggcgagtgccgacacagtcataaccttcgacttcaatgccgtgaatcatttcgggtaatagttcaggcggatcttgtaagtcaacatccatcactgaaacgtagtcgccagttgcggcttgtaagccagcatacaaggcagcctctttaccgaagttccgagagaatgaaatgtagtgaacgtgttcagggtcttgtgcctgtaacgcgcgcatttccgccaggctttcatcagcagaaccatcgttaacgaagatgtattcgatgcggtggtcggctagagtagccgctactttctcaactgctgcgtagaaaagcggaattgattcttgctcgttataacagggtacaataattgaaatcatcttaatcctccgaagtatctttgaaaatccatttgctaaatacatagttcgctaaaatcacgataatctgatctagcactttaacaatcatgttgggccataccaataaggaaatcccaacaaacataattgccgtatccattataaatgatataccacggaagaaaaagaaactagccatttcacgggaaaagtcctttaaagttgtatattttgactgaaagacccacgttttattggtgaaaaaggcaaatagcacggataagaaccaggcaatcgtgttgctgacgagataattgatagttgtatagtggtctaatccgaagaaaacgaccatgttgactagggttgttaagacaccaaagaccaaatacattaattgttcccagtatttttgaatgagttgttggatggctttaatcattgtgacctcttttcaaaatggcattgtaccgacggagaatccgcccccggagtgccatttgttgttctgtttttttgaaagtgtagcgggtggtgatgtagttgacaatgccgacaattaactgatcgataatcttggcggtcatactctgccaccctaagaaggagatggcgacaatcatcaaaccgttatccaagaaaaaggatacaccacggaaaaagaaaaacgaaagcacttcacgacacacagcgccaaacgtggtgtatttggattggaatacaagcgacttattggtaaaaaagccaaataaattcgcgacaaaccacgccattgtattggcgagtaaatacggccaaataatggtgtggcgaaatacccagtaagtaaaaatattaaccaacgatgctaaaaaaccaaaaatcgtataggtcaaaaaatcgcggtatttaaacactaaccgtttaatgaaagccataaagacagctcctagtttgatttattaaggtctaaaagaccaaaagaagggccgcggtaaaaagggacgtaaccgcggcccagggaagattggttgaaacgtgcttgttgaaacatacttctgcgcttaaccaaatttaccaaataggtgattgcatcacctattcggcaaatccagttaatgctcaaagcataaccgtttcaaacgcactctgccttgaaacgtgcttgttgaaacatacttctgcgcttaaccaaatttaccgaataggtgattgcatcacctattcggcaaatccagttaatgctcaaagcataaccgtttcaaacgcactctgccttgaaacgtgcttgttgaaacatacttctgcgcttaaccaaatttaccaaataggtgattgcatcacctattcggcaaatccagttaatgctcaaagcataaccgtttcaaacgcactctgccttgaaacgtgctttataagctagtatcctgtgcctagctacgtccggcaaacagccaacttgttggctattcaccagactaggttagtgctcggatactgaccgagcttataacgcactctgttttgcaacaatctctgatacgaatttttcaagatgttcgatatcttctgcttctgctgatagatcgactttgacaacgtctgaaccctttgttgcgccggtttgttcgaagacggctgcaaaatcatcaaccactttacagaagtcatcgtagaacgtatcaccggagccacagacaccgtagactttaccagttaaatcaatatccttgagatcttcgtagaaatcaacggcttcatcggggagatcgccatcatcgccataggtgtagctgcagacgatacagatatcgctgtcttcaaaatcggcaggatctgcttgagagatttcagtggtttcaacgtcgacgttcaaactttcgagggcttcttcaacgatttcggcaatttcctcgttattgccggtcatacttgcatagactactttagcagttgccattattgggacatcctttcacgtacgcggcgctcagtggccgcaattaacgaattatactataaggcattatagcaaaagccccttattaagaaaaggttcaacggctctttcacggttaattgaactaaaaagcgacgattcgtccattttaatggcagatagcgtataatatagaaatagatacaattaaaggctacaatggtaacaatattggaggtttcattttgattacattaaaatctgaacgagaaattaaagggatggctgcttctggcgccattattgccggcgttcatcgcggcttgcgtgacatcatcaaaccaggtatttcgagctgggtaattgaagaattcgcaaacgactacatcgaacaacacggtgccaaagcatctgaaaaaggctttgaaggctacaagtacgcaacttgtgtctgcgtgaatgaggaagtggcacatgccattccacggaagaacttaattctaaaagaaggcgacattgtcagtgtcgacatgaccgttaacttggacggttatgaaagtgattcttgctggacttatgcggttggcgaaatcgcaccagaattacaaaaattaatggacgatacgcgcaaagcactttacttaggcattgatcaagccgttgtcggcaatcgcctaggtgatatcggccacgccatccaacaatataccgaagttgaaaacagctacggtgacgtccgtgaattgattggacatggtattcaaccaacgatgcacgaacaaccaaacgtgccttcatacggtgaagcgggcaagggcttgcgccttaaagaggggatgaccatcacaattgaaccaatggtcatcttaggtggcacatggcacatcaagtcaaaagaagtccctggcgaagactgggaatattacgtctcagcagatggcacaccatgtgcgcaatatgaacacacaattgcgattaccaaagatggtcctaagattctaacctcacaagatccagaaatggatgctaaatatttactataaaattagaaaccttctctaaaatgagaaggtttctttttttgctttcagaaaactattagcccatagttaattcgtgtataatagaaatgataaacatgccttaagaagtcgggaaaataagcctttcaggtagaacgactaatgtgtaaaagagaatttggagtgacatatgacagtagacaatcaaaaccagttaccggtggtaaaacaggacttatccagacggcagaagttgattgctgtggtgaagttaatgatgttgcgttcatcagaagcaagcattagtgataattcgaaggtaatcgcatattattcgttattatcaatcttcccactattaatcgttatcgggaacatcttaccgtacttccagttagatgtaatgagtgtggcggattacgtccaaacggcggtgccgcccacgatattcgacaagattatgccagttctgcagtccctattgaagaaacgcaatgatggcttattgtccgtcgggatcttggggacgttgtgggcagcgagcatggggattaatgccttaaaaaatagtattaaccgcgcgtatcgtgttgaaaaagttcagaactttgttttaaaacgcctgatttctttggggagtacattattattacttctattattagtcggtttaattgttgtttttacattcgggcaacaagttttggaattattagtcccaatctttaacattcctaagacatacgttaatatttttagtagtttaaaatggccagtgacggggatcgccttgttcctactgctgattttcatctatttcttcgttccgaatgtgaaaatgcgattgcgaagtgttctgccaggggcagcactgacaacggttggctggttaattcttgcacaagccttctcattgtatattcgttacttcggcacgtcatggaatagttacggtgcaatcggtgcggtgattatcttactcttgtggctgaattattccgcaacgattctgatggttggggctgtcttgaatgttgtgattgaagaagcactgcatgggcatgttaacgccagtcgcggtaaggttcatgacttcattgcgcgtcggcgcgatcaaaatgaatgacagccgaaaaattaatgagacaaagcacaaatatgaattgaaacgttaaccaattatataggttgtaagaattcgggaatcaaccggatgattacaacctatttttagtctctaaaattaaaattatttatctcaaccgatatgtcaaactaatgtttttacatatcggttttttgatggacttagatttcgtaaaccactttcactttcgatactttaaaaatatttaattatttaaaaatcttgaatattgaattaccgcccaatgttaagggggttattcacaatttagtgtgaaaactaagtgttttttattaaggtgtattccagaaaaggatttcctttttaataaaagttatactataatagaaaatattgtagtataaatagtatgtaatgtgattgattatttttttgtttagttttcgaggaggatacgaaacggatgactgcagaagaacagaagcgacaccatcaccataagcaccggcgcagagggtggacattaacaaaagtgattttagttgttcttggggtattgattcttgccgggggcgcattcgcagctaaggtctatatggatgttaatcaaaccgccaagacagtgtataaatccaaaggtaagacacaaaataagcgcaaagtttcagaaaaagtcgaactgaataagaagacgcctttctcgatcctcttactcggtacagatacaggggaactaggccggaccgaaaaaggccggactgatacgatgatgcttgcgacggttaatccaacgactaaggaaactaatatgttgagtatcgcccgtgattcaagggtaccaattgttggctatggtcagacggctaagattaatgccgcgtatgcctatggtggcattccaatggcagttaatactgtccaagccttcttaaacgtaccggttgattactatgtattggttaacatgaagggcttggaacaattagtggatgccgttggtggcgtgaccgtggataatgatttggacttcacctatgaggggcaccacttcgaaaaaggaacggtacaattagatggatcaactgccttgaaattctcacggatgcgctacgatgatccacgcggagattttggtcggcaactccggcaacaagcaattgtccaagctgttttgaagaaagcaacttcattaaatatggtgacaaactataaccaaatcttacaggtgctagcgaataatatgcaaactaatatcaccttgaaggatgtcttgaacattcaacaaaattatggggatgcgatgaacttcaagacattacaattgaaagggactgggcagatgattgacgggcaatcgttccaagtcatgaatccaactgaggtatcaaagatgtcgacacttctaagaaaacaactagatttaaaataaccacggaagaagctaaccagtattggttaacttcttttcgtatggacaaagtagttataactgttaattaatttctggagggtatcatggaacaaacaattaatattgaacagattttcggcatcttgcgcaagtatcgccgcttaattctatcatcgacagtggtatgtacattattagctgttatcgtgacattctttttgattacaccacaatatagcgcttcaaccgaactgttagttaatcgcaagcaaagcggtgatgcaaatgtccaatggaatcaagtccaaaccgatgtacaaatgatcaatacgtataaggatttaattacgaaaccagtcattatggattcagtcgctaagaaaattaacaagggtagcaatcaaaaattagacgatacaactatcgcaagcatgattggcgtttcaaataatcaaaattcacaagttttctcaatcactgctaaagcagataatgcttatacagctgctgatattgccaatacaacagcgcaaactttccaaaaaaaggcacccaagattatgagtgggacagataatgtctctattatttcagaggctaaacctgatttaaagccagtttcacccaagaagaaattaaatgtgttaattggccttgccttagggatattactcggcgttgggattgccttcttacgtgagttgacggacaagacggttaaagacgaaagcttcctaacggatgatttaggcttaacaagcttaggcgttgtgaataacattgctgaaaaagatttaatcaaaaaagcgattatgagtgtcagcactagccgcttatcgagaagagggtaagaagaaatgggattatttagaaaagaaaagaaattagatcaagcaagtatgcaagaaggggtcggtttaattactttaactgatccgacttcagttattgcggaacaattccggacaatccgcacgaatattcaattttcatcaatcgatcaaaagttgcgcagtgtagtcttcacgtcatcaggcccttcgcaaggtaaatcaacggtgagtgctaacgttgctgtaacctgggctgatcaaggagttgatgtattgctagtcgatgctgatatgcgtcgaccaacagttcatcaaactttccaagtaccgaataaaaaaggcttaacgtcattattaacggaagaaaatttcgatttaaatagtgccattcaaaaaacaccggttgatcatttatttgttttaccatgtggggtagtaccacccaatccatcggaactattgaatactaagaaaatggataaattgattttagaattaacgaagcactttgatttagtgatttttgatgtaccgcctgtagtatcggtgacggatgcacaaatccttgctagcaaagttgatgggacaattctggtggtaccacaagggattgttgaaaagggttcggttgccaaggcaaaagagttgttagaagtcgttaatgcccgaattttaggaacaattatgaaccgcgttaaagcagaaaatacgggtggctactatggtggctactatggtgccaaagagtccaagaaatagtttaaattgggggaaataaagcatggagatacaaaaggaggacactagtcgggcgtcgattgaaaatacacaccaagtaatgctttttaatcaagctgttttagatcagcggtatatttatcgcggcttaaaacggttattcgatattgttgccagtttggcagggttaattctattaagcccgctatttttggtactggcgatttggattaaggttgatgatccagcgggtggggttttctactcacagactcgtttaggtctaaaacaaaagaaatttaaaatgtacaagtttagatcaatgtgtagtgatgctgatcagaagttaaaagatcttctcaaatataacgaggttgaaggtgcgatgtttaaaatgaaagaggaccctagaattacatcagtagggcgtttcattcgcaagtatagtattgatgaattaccacaattgtggaatgttctagttggcgatatgacgcttgttggaccgcgaccaccattggaacgtgaaattaaagagtatactgattacgattggcaacgcctaatggttaaaccggggtgtactggcttgtggcaggttagcgggcgcaacagtatcagcttccacgaaatggttgaattagatttgaaatatattagaaaaagtagtttggtttatgatttggggattctatttaggacagtcaaaatcatgattataccaaatgatgcgtattagtctgaggagaataaaatgagtaagaatgtatttattatcggtgccaaaggaatttggatgtaagctgattcctgagacaacttttaagagagggtataatgaataaatcatctctcaaaaggaaggaatttttacatgccaactcgttacgacaaagaattcaaacaaaacattatcaacctatataagcaaggcgaatcagctgcccaactggccagagaatatggcattggctattcaacagttcataagtggatccagggccaggccaaaactcaatccggtaaatcgccagacaaaatcaaagcgatggaaaagcgactggcttcgctgtctgaggagaacgaaatcctaaaaaagccctgggcttccttgcgcagaagtaaccaatatctttgattacattcaccaagaaagccatcaccatcaggtaaccaagatgtgccgaatcctcggtgtttccagagctcagtattatcgttatcgatcccccaaaccttcaaaacgccgggccgaagatgcgggcttgaaacaacggattctgcggatctttgcggaatttaagcagcgatacggtgttatgaagatccaccatgaattgaatctggaacttcaaccactgcagcttcggtgcagtccacgacggatttcccggctcatgaaggaactggatagccactccgttaccgtcaataagtggaaagcggcttcggcttccaaaaccaaggttgaacagcgtcccaacttgcttaagcaggatttctcgaccactggtttaaatcaaaaatggaccgctgatatgacctatattcaaacgaagcgtaatggctggtgttacttatcaaccatcatggacctgcactcacgacggattatcggctattcgttctcaaaaaagatggctactgatttagtcttaaagacccttgaaagcgcggttaaaaatcgaaccattactggggacctgattatctatacggatttaggatcacagtataccagcgatgattacaatcaacgtttaactgagctacatatccgccactcatacagccgtaagggttatccgtatgataatgcgccaatggaatcctttcacgctttcctcaaaaaggaatgtgtttatccagtgccggtctttgaagattatgaaactgccgctgccgtcctttttgaatatgtgcatgctttctacaataggaagagaattcatagttcactgggctaccagacccccttacaagttgaaattgcaacacttacgagccaaatggccgcctgatttaatgctttccagggttcaaataagttattaatcgcgattaatgatttatttgagctgtggaaggtaaacgcggttctgaatgtctcttaaaatctgtctcaaatattgacttcaatccaggttggggaataaatggtgtcctaacaggtactctattaacgactattttaataagtagttggtgggaaaataggcaaatattccattacggatttaaaaagagtgtaaaatcatttttaatcaagcaatatttatttataattttaggagttttaattatagggatggtttacacaatcacttcatttgtactgattggtgagctaacaggaataattgtacgctccataattgcgattttaatattatgtattctgtttacaggtttgttttggagaaatgaagaatttaattatctaatgtatttaatatatagaattttaaaatctgttaagaagtaaatggacataatatttctaaattaattagttcaaacttaagggggagttttttatgaaaggtattattctagcaggcggttccgggacacgtttgtatcccatcacacgcgctttatcaaaacaattgattccaatctatgacaaaccaatgatttactatccaatgtcagtgctcatgttggccgggattcaagatattatggttatctcaaccccaactgacacaccacggtttaaagagttatttggcaacggcaatgatttggggttaaacatcgaatacgccgttcaagaacaacccaatggtttggcagaagctttcgtgattggggcggatttcatcggcgatgattcagtatgcttaatcttgggcgacaacatctattatggtgataatttgtcagaaatgcttcaaagaacagctcaaaaagaatcaggcgcaaccgtttttggttatcatgtgaatgatccagaacgctttggcgttgttgattttgatgaaaatatgcatgctaaatcaatcgttgaaaagccagaacatccggcaagtaactatgcggtgactgggttatacttctacgacaaccaagttgtcgacattgcgaagaatattaaaccttcaccacgtggcgaactagaaattacagacatcaacaaagcgtatcttgaaaaaggccagctagatgttgaattaatgggccgtgggtttgcttggttagatactggaacccatgattcattacaagaagccagcagttttattgcgaccgttcaaaaacggcaaaacttgaaagtggcgtgtctagaagaaattgcttaccgcatgcactatatcgataaagcaaaagtgattgaattggcacaaccactcaagaaaaacgactacggtcaatatttattgcgattagtaaaagaagattaggggtaagtaatcatgggtaagttaaaagtcacaacaactaaattacaagacgttaaaattattgaaccagccgtctttggtgatcatcgtggattctttacagaatcttattcagatcgcgatttcaaagaagcgggcattgatattgatttcattcaagataatcactcactttcaacgcaagcaggcgttttacgaggcttacatttccaacgcggtaaagctgcgcaaacgaaattaattcgcgtggtgactggggctgtcttagatgtcatcgttgacgttcgtgcaggttcaccaacttacaaacaatgggaagggtacatcctttctgccagcaatcaccgtcaattacttgttccaaagggcttcgcccatggctttgtcactttgacggataacgttaacttcttgtataaatgtgatggctactatgatgcagaagctgacggcggtatttcattcaagacaccagaattaaacatcgattggccaattgattttgaccaagcaattacgtctaaaaaagatgctaaccaaccaacctttactgaatttgaaaaagataatccgtttgtttacggtgaaatttaaggagatcgacacactatgaaaaatattattgttaccggtggggccggctttatcggttctaacttcgtgcattatgtggtgaataaccacccagaagttcacgtgacggttttagataaattaacttacgctgggaaccgtgcgaacttggccggtttaccagcagaccgtgtggaattagttgttggcgatatctgtgacgctgaattagtggatcgcttagtccaaaagacagacgcagtggtacactatgctgccgaaagtcacaacgataattctttgaaagatccttcaccctttattcaaacgaacatcatcggttcatatacgttgatcgaagcttgtcgcaagtataatgtgcgttatcaccacgtttcaaccgatgaagtatacggtgatttaccattgcgtgaagacttaccagggcacggcgaaggcgttggtgaaaaattcactcctgaaacgcgttataacccaagtagtccttattcatcatcaaaggcgagctcagacttgttagtccgggcatgggtgcgttcattcggcctacaagcaaccatttcaaactgttcaaataactacggtccttatcaacacattgaaaaattcattccccgtcaaattaccaatattttaagtgggattcgaccaaaactttacggttcaggtcaaaatgtgcgtgattggattcatacgaatgatcactcaagcgccgtatgggcaatcctaaccaaaggcaaaatcggtgaaacttatttaatcggtgccgacggcgaacaaaacaataaagatgttttggaattaatcttagaattaatggggcaacccaaagatgcttatgatcaagttaaagaccgtccgggtcatgacttacgctatgccatcgattcaacgaagttacgggaagaattaggctggcaaccagaattcactgattttaaatcaggcttacaacataccatcgactggtatcgtgacaatgaagactggtggcaagcagaaaaagcagccgtggaagccaactacgctaaaaacggtcaataaatataactaaatgagagtaggcgaacgcctactttttttaaggagaagagttaacgatgaaaattttaatcactggtgcaaatggtcaattagggaccgaattacgacatttattagacgaaaaccaaatcgaatatgtggggacagatgcagccgaattagacattactaatgcagacgcagtcacaacatactttgaaaagaacaagcctgaattggtttatcactgcgcagcttatacagctgtcgatgctgctgaagaagaacctggcaagtcaatcaattacaaagtgaacgtggttggaacgcaaaacattgccaatgctgctgaagcaatcggcgcaacgcttgtttacattagtacggattatgtctttgatggtacgaatgatcaaatgtacacagaagaaaccccagctgcacctaagaatgaatatggtcgcacaaaattggctggtgaagaagccgttgcaaatacaatgagcaaatactacatcatccggacttcatgggtctttggtgaatatggtaagaacttcgtttacacgatgttaaatcttgcgaagacgcatgatcatttaacagtcgttagtgatcaagtcggtcgtccaacttggacccggacgttggctgaattcatgttatacgctgttcaaaacgacgtgccgtatggcttgtatcaactttcagatgacaattcatgtacttggtatgaatttgcgagcgaaatcttgaaggataaagacgtagaagtgagtccggtaacatcagacgaatatcctcaaaaagcattccgtccaagacattcaatcatggatttaacgaagattaaggcaactggatttgaagtaccaacctggcaagatgcattacaaaaatttatggcaaaaatcgattagtataattaaaaaggtgagtaatcatatgattgctcaccttttttaattatactaataacgcactaaacttcttttgcaccataaatttaatattattggctgttcgccgtgtgatgtttaagtctgcggcgatttcttttaggctggcgttgtagaagtagcggaggactaagaagcgtttttcgcgtggggtacagacttgatagaggcgttcgaagaggtcgttgcagatggcggcgtcttctgggttgcagtagggatctgcgacttggtcgaggtagtccatcacggaatcatcatcgtttatccggttaacgaagccgattcgcttgtcgtggttattatccttgcggaaggtcatcataattgcccatttaacagcctgatacgcgtaaaccatgaagcggtgggtttcgacttcaatattgcctgggaaatgatcgtaggcttcgacaaaggcaatcacgccaatttggtagagatcggcgaagttattgcgctgccgtggaacgtggagatctttgagaacaccatagatgagggtgtcgtcttgtgtaataaaatcaaaggcagtttgtaaatctgatcgggtcattgtcaagcatcctgtctactatgagctcacagtgtgaattaccggtaagttcactatagcgggtttgcataaggaagggtaatcgccgattttagcggtaaatcaatccgtttcagctttaatttgcgcaaatgcattgaaatacaaatgaaaactattgtaaatagcgacttcgggttaatttataattggcgtaatttttgaattagtgctttaacacttttgatatagcactgaatgtcaaatacgctgaattcggggtattcatggattacggcttggtaaatgaaattttccttttgcatttcaagtgcgttgagtaatccgagtagttcagtagctgttttcggaacattcgagcacagatggcaatggcaatcatcgaagcgatggacgatgcttggcttgaaacaagtcttgagcttgatttgatagccgaaattagtggcacacacagtgagacagccaagttggactttgccaatggctgcacattgatgaatttcagtatcgatttgacggcctttataagggaggatacaggtacagtcatttagcaatgtcacgtagagatggttatcgctaacttcgtaatcacggacgtagtggagcgctaaccacggtgcgttttgatgagccgtgccacttaatggtaaatactgatattcgccattgatgtgtggaatcttacgataccaattgaaacaatggcaaaggtaccggggttgtgagaagtccatgatctgatggcgattataagcgcgcattagttgccgggtagaacgcggactaatttggagaccggttatgcggtctaacacaagactttgcgattttttatagggaataatcaccattgtgtcactcgtaatactagtttggtaagaacggggaattgacgattgatccagctcacagaagttataatcaataccacgtttgatgatgagtggcacgggaagacattcatgggatgtattgacatgtttgggatgtagtagaaacatcgaagacctcctttattgttaacctcttgagaataccaatgatgggaatcgcttacaaaacaattgtgaaaagattgataaaatcctaagtgcttgttaatcttttcctcattttcggcatataattggtgcaaatccacttttttatggcatactgttattagactatatgttatgggggattttagtagatgaaagtacgtaaagcagttattccagcagccggattaggcactcgttttttaccagctaccaaagcgatggcgaaggaaatgttgccaattgttgataaaccaacgattcaatttatcgtggaagaagcaaaggcttcagggattgaagatatcttaattatcactggtaaaggcaaacgcccaattgaagatcactttgattcagcaccagagttggaacaaaacttgaaagccaagaataagaccgctatgttgaagatggtcaacgaaacgactgatatgggggttaacttgtacttcattcgccaatcacatccaaacggattaggggatgcagtgcgccttgcaaaatcattcgttgctgacgaaccttttatcgttatgttaggtgatgacttgatggaagataaggtgccattgagtaaacaactaatcaatgaatatgaagaaacacatgcatcacaattagccgttatgaaggtgccacataatgaagtggacaaatacggcgtgattaacccagaaaacaaagttaaagatgatttatacaacgttaagaacttcgttgaaaaaccagctgttgataaggcacctagtgatttagcaatcattggtcgttacctgttaacgcctgaaatttttgatattttagaaaaccaaaaaccgggtcttggtggtgaaattcaattaaccgatgcgattgatgaattgaacaagacccaacgcgtcttcgcccatgaattcaaaggccgtcgttacgatgttgggaacaagttcggttacctagaaacaagtatcgaatatgggttaaaacacccagaagtgaaagatgatttgaagaaatacatcatcgacttagcagaagaattaaaaaaagacactaaaaaagaaaataaataacctgtaaaaaacgttcaaccactccgaacattggaatggttgaacgttttttgttgttttttaaataatacggccctcacagtgatccacttcatgttggataatctgagcaatccagcctgagaaagctcgcctatgcggtttgaaggcttggtcttgataagtgacctcgattgtttcataacgcgttgtcggacgttctccgtttaatgagaggcagccttcagtcgtttgataaggtttggcttggcgcacaatctgtggattcacaagaatcacaggtaagacgcccatttgaacgatgataatccgtttattgatgccaatcatgttggcagccattccgacgcaacgttctgtgttggcttgtaaagtatcacgtaaatcagtcatcacatcggtatcagctggtgttgctggaactgctttttgagctaagaattgcgtgtcacgcataatgggtttaatcatagtagactccttgagtagtagttcttccattatagcagaaaataaactcattcaattctcatttagtgaaagtccgccttatctgcgggcttttttaatgcgattatttagggattagagtctgcttttcaatattgtggtaaaaaattcgacaaatttggattttatgcttataattattaacatactattataaaacgtctaatctaatcttaataacgcgttaagagcgatgagagaagttggtcaggcattaagggaggatcacatgaagaaattactcgtatttttaggcagctgtttactcgcaggcttatttgtatttgggagtcaagtgaataatcaggttcaagccgctgaaaaaacttatgaaatcggtacggatgtgacctatccaccattcgagtttgcgaatgagaagaatcaatatgtcggtattgatattgatatcatgaaggcagttgcgaagtccgagggctttaaagtgaatattaaaccgttgggcttcaacgcagcggttcaagccgttcagtcggaacaaattgacggcgtgattgccgggatgacaattacacctgaacggcaagcaaaattcgatttcgctgatccttactacaagaccggggttgtaatggccgttcaaaaggacagtaagattaaaggcttagaagggttgcgcggtaaacgtgttgcgattaaaacagggactgccgctggggcctatgcgacggccaaagcgaaagaatatggctttaccaccgttacgtttgatgattcagataatatgtataatgatgttgtgaatggtaattcggcagcctgttttgaagacgagcccgttatgcaatatgggattaagacgggcttgaaactcaagattgtcaccaaacctgctcaaggtggcgaatatggatttgccgttaagaaagggagcaatcctgaactcatcgctaaattcaataaaggtcttgctaaattaaaagcaaatggtcaatacgacaaaattaaagcaaaatatttaagtacagaatcaactaaaaaagcaaccgttgatcacagcttttttggattattgaaagaaaataaagatgcgttgttgagcggtttaggccagacgttattattaacagtcattgcgattttcttcgcaacgattttcggggttttcttcggattactcggcgtattacctaaccggtttgcgcgtagcgtttcagatacggtcatctatattttccgtgggttacccctcttggtgcttgcattattcatctatactgggattccaagtttaactgggcagaagattccagcgattgtggctggggtcatcacgctgatgttcaatgaaggggcttatactgcagcctttgtcaaagggggcattggcgcggttagcaccggacaaatggaagcagcgcggagtttagggttaccatatggtaaagcaatgcggcgcgttgtgttaccacaagggatccgcattatgattccatccttcattaaccaattcatcatcacattgaaagatacgtcaattttatcaatcatcgggattctcgaattgacacagacgggtaaaattatcatcgcccgcaaccttgaagggttcaaaatttgggcaatgattgccttaatctatctgatcgttatcacgttactcacgtggttatcgaagtacattgaggggagaatagataactaatgaatagaattgaagtgtctcatcttattaagaattacggcagtaacgaagtgttaaaagatttggacttaacggtcggtgataatgaagtggttgtcatgatcggcccctcaggttcaggaaagagcacgttcttgcgctgcttgaatcgcttagaagaacccacgagtggtgagattatcgttgatgggtacaacctcagtgatcctaagagtgatttgaaccaaattcgcgaaaaaatcgggatggtattccaacactttaatcttttcaaaaatctaacggtcgctgaaaatattacactcgcaccagtggaactcggtaaaatgacgccggcagaagcaaaagaaaccgccaagaaactacttgaaacggttggtttatcagagaaattcgatgcaaaaccacaatcgctatcaggtgggcaaaaacaacgggtcgccattgcgcgtgccttagcgatgaaacctgatattctcttgttcgacgaaccaacatcagcgctcgatcctgaaatggtcggcgacgtgttggccgttatgaagcggttagccaaagaagggatgacgatggttgtcgtgactcacgaaatgggctttgccaaagaagtggccgaccgcgtcatcttcatggcagatggacacattgtcgaacaaggcacaccacaggaaatctttgacaccccacaaaacgaaagaacaaaagacttcctgaacaaggtactaaatgcatagcgtgtgtttcaaaaagcacgtttaacgccaaccaaaaaagcggcccaccattacttggtgagccgcttttacgattcttaggtctttagaatgttagaatagaaataggaactagtagagaaaagagggattacgatgcggttaggcttaaaagcagggattaacgatcagcaaattgctgatcgaatgcagtatcagccaacgtattttgaatttcatttaacagccgaagatgtcacgccaaatgggctagtacgcttacgcgaaaaaattcgttatgtacgcagtcagcaggttgaacggattattttacaccacccaatgagtttcgaagggcatcatattgaactgtcgatgaatgaagcaagttcgccagcccgataccgctttttatggcaatcaacactcgatttattgcagttagcgaaagctgaagatgtccaactattggtgcatggctcttatgatgatccaattgaagaattgacgacgggttacagtaatattacggatgccattcgtgttttgttcaagcgcctcgattatttacagcggattggcggacaaaatattatgttcgaaaattcaatttcaccgattttctattatggcaatccgatttttgatcaggccatctttgataaaggttaccgcttagcgtttgatacgagtcattgttttatcaagttgcagggtgatcagaatgctttcttgcagagtctggcaactttgcgtgagcacgttgttcattatcatctggttgattcgatgggtttgaagcatgatgggttgcaattagggactggcaaaattgactgggcccgcgtattgccattgttaaatcctgatgccagttcgatctatgagattcaattagccgatcaaaatgatgcacgagaaatgattgcgagtcatcgttatttaacgcaacttgaacaaacattatccgagtagaattttgtcagcagcaacgcgaaaaccaaacaaaggatagtcccccgtctttgtttggacatacatataatgttggtagtagtttttttgatttaataataggctaaattcccactgcttcagcggctttttgtctgcggcctttaactgcagtaatagtcgtggctgttcgtcaacgacggcgagctcaaagtgggcgataggttggagctcttcagggccttcgaagtagatgccatcgtttttgggtgtatcagctaatagctgtagtaagtcaatgacgcgcatgataagtcgtcctttctaatagtgcgaaaatcccggcaataatcagccaacaaacacccgacaagctagcggcgatggttaggataattgccattggtgttagaacaccaatgagccaagtcgtggtgttgactgttggcacaaatgaaaacagaccagtaacgaggcagaccgcaatgactgtggcaataatccctggaatcgtacctttaaaatcagctgcggataagtcataaccaccgatggcaatcatgctagttaagattaaccagagcaagagagcacccggttgcgtcgtccagagctggctgaataagggaccgatggcgtttaactgccaagtgggatgttcagcaaaggtcatccacgttgcaaaagtgggccgtgctaataaccaagtcagtccgaaaatggcggctgaacaaccaaaaatcggggcaatcccaatccagagattaccaattgttggccaaagacggccggaatggtatcggtgattgacatggccaagcgagtgatcgggattatcccgtagatttaattttaagagttgcatatcgataatttggtgttggaagattaaacaggcaacagcatggctgagttcatgaatcacggtgcctaggccgccaattaaaagttgtgagtaatcccaccaatgggctaagcgccgtttagttgaacgattgattagtgttaaaatcccggcaaaagctagtggtagcgcaattaccagtaaacaattaagtaacattgattgcaatatttgcgataagttaaatgaattgggcatgataactcctttgaacgactttatgtaagcctacaccaaagtttatcgcggaaacaaggggtgttaatcaatttatgtaaaacgcaaaaaaaagcccccaaatcagattcgatttgggggctgtatgctgcttaattatttgtcagaaaagattggtgtttcaatctgttcaacgtatttggcaccaactggttctttgtagagttcaattccttttttaataaacatattggctgctgcgattttagtcatcgcacttctaactgtttcggcgtctaagttgtcatcaatattgtttaagcgcaatacacgactcttagcatcactgtttttaaattctaagcaaagttgtttcatcttgaattcctcctcaaagattggtatgttttttatttagcgatataagcggatttagtggttagagtagctgttgcaaatgtgtcacctgcgtggagacttgcgagggcttcgccaactgtttggatttccgtggcttgaacgtcttcttttacggcggtcatacgacgttgtaaactttcatttggatagtctgtattttgtaattcaaaagcgatcgatgttgctaaccatgatgtttgcatgtggattcctcctaaagattagttgtaagcgtcaccggtgaatgacttacgctaatgagtaatgcacgatgccgataaaatggtaaaataatctcagcttaccaagcggatttctaaaaaaaagttaaagaaattgtgaattaccagacgtttcatgaaaatttagttatagtaataattagacttatagatgaagagggatattatgcaagaagtggttattatcagtgcaaagcggacaccgattggtaaattggggggccaacttgcaagtttaagcgcggttgaattggggacagttgctgctaaagcggcgattgaagcagccgggattgatccaactcagattgatcaagcaattttcgggaatgtcttacaagccggttctgggcaaaacgttgcacggcaaatcgctttgaagagtgggatgacacaatcaagcacagcaatgacagttaatgaagtttgtggctccggcctaaaagcaattcggttggcgcagagtgcaatcgtcatgggcgatgctgacatcgtcttagttggcggtacagaaagtatgtcacaagcgccttatttgaataaacaaatgcgttttgggagtaaatttggggatcaaacaatgattgatagcatcagtagcgaagggttaaacgatgcgtttacgcaccagccaatggggattacaggcgaaaatgtagcagctaaatacggcgttacgcgtgaaatgcaagacgcttttgcactcgcttctcatcaaaaagccgcgcaagcgacccaagctggttggtttaatgaagaaattgtacctgtaacggtgcaacaacgcaaagcaacgcttgaagtacaacaagatgaaggtatccgcccaacgacaaccatcgaagcaatggcgaagttgcgcccagcttttcaacaagatgggactgtaacacctgccaatgcttccggcattaacgatggcgcttctgccatgatcgttatgagcaaggaaaaagctgctgcactcggattagtttaccaagccactttggtcggctatcaagaagtcggtgctgatccagattacatggggtacacgccggtcgatgcaattcaaaaattattagcgcaacaaaatcaaacattagccgatatcgatttattggaaattaacgaagcgtttgccgcttcaagtgtggccgttcaaaatgggttacaagtcgatcctgctaaagttaatgtggccggtggcgctattgcgttgggccatccaatcggtgcttcaggcacgcgcatcatgacaacgttaatacaccaattgaaacggacgcaccaaacaacagggattgcttcgttatgtattggtggcgggttaggaattgcttttgaaattcaattaaatgaggcatggtgtaatgaaaaagcctaagttctatcaattaacgaaggatgaacgtttagcaacgcttgttgaacaaggtcacctaagtcagacggatgctgattgtttagcagctgcagaacccttgtcagatgagatcgctggtaatatgattgaaaaccaaattggccagtaccaagtaccgcttggtgtggtgcaagatttattagtcaatcagcaagtctatcaagtcccgtttgcgatcgaagaaccatccgttatcgcggcggctaataatgcggctaagatggcacgagctaatggcggctttgtgactgaacaactgacgcggctgatgactggtgaagtcgtgttagagaagctagttgacttagtagcggctaaagcttggattagtggcaacaatgaccatttatttgaagttgcacgggctgcgcatccatcaattgttaaacgcggtggtggtcttcaaaaaatcacgccgacgattattgacgaccgctttttgaaacttgaattgcaaattgataccaaagaagcgatgggtgccaacattgtgaacacaatctgtgaagcgatcgcacatgctgtgcaagaacagttgggcggcaaccttttattgagtgttttgaccaatgccgcgtttgaatccgtggtgaccgcaagtgtgacgattgatccagctaccttaacaactgcgacgcttgctggcgaaacaattgccgaaaagatgattgcggcgagtgactttgccaaagtggatgtggcgcgcgcagcaacccacaataaagggattatgaacggcatcgatgcagtggtgttagcgacgggcaacgattggcgcgcaattgaagccggcgtgcatagttatgctgctagaaagggtgcttatcaaccgctttcgagttgggaatggacaactgatcagcaactacgcggtcgaatcgaactgccactgccagttgggatggttggcggatcgattggtattctaccaaccgtgcagattaatcagcgcttgttaaaagttcagaatgcgcgtgaattagccggcattatcgcagctgttggcttagcacaaaattttgccgcgctcaaagcacttgtgtcagacgggattcaaaaaggacacatggcgcttcaagcgaagtcgttggcgattgccgctggcgcaaccgagactgaattaacgcaattattaccattattattgaaagcgacacatttaaatacagcaacagcaaccgagctgttagcgcaactgcgtgctgaaaacaaatagattggaagtttattatgcaaatcggaattgataagatgggcctttttacgcctaatacctacttagatttagtgatgctagctaacgcgcgaggcgttgatcctgacaaatacacaattggaattggtcaagatcaaatggcaattgcccccctcagtcaagacagtgtcacaatggcggctaacgcggctcttgaagtgttggatgatgataatcgtgattcaattggtttattaattttaggcactgaatcaggaatcgatcagtcaaaagccggcgccctttatgtacaacgcttattaggattaaaaaatgcccgtgcttttgaaattaaagaagcttgttacggtgcaaccgctggtttgatgaccgcttatgactttgtagcggcacatccagagcaaaaagcattagtcatcggttctgacattgcccgttatgggctggatacaccaggtgaagtgacacaaggtgccggcgcggttgcaatgatcgttagtgcagcaccacgtttgttggcgttagaaccggcaacggccatccacagtgatgacattcaagatttctggcgccccaactattcaaaagaagcttttgcgcgtggcaaatattcaactgaacaatacatcgaatttttccaagcaacttgggcagactatcgcgctcaaactggccgcacaatttcagatttcaaagccttaacgttccatttaccatacacaaagatgggtttgaaggcattgcggacaatcctgccaggagcaacggaagcagaacaagcacatttattagaccgttatcaagaaagtacattgtatagccgtcaaattggtaatatctacaccggtgcgttatacctaggcttcctttcattattggaacaatcaacgcaattggcagccggcgatcgaattggtttattcagttacggttcaggtgcgatcagtgaattcttcaccggtattttgcaacccggatttgaaaaacaattagccggtgcggaccacaaagcaatgcttgctgcacgacgtcaattgacgatggctgaatacgaaaatcaattccaagcagaactaccagaagacggtagcgaatatgaaattgatttggcaatggacaacgcgtcaatcattttaaaaggtgttaaggaacacgaacgcaattatcaagttagagattaataaaaaacagctatgtatcctaaaaactgccattaacagtattgttaatggcagtttttttagctatttctgataaaaataacaagtcagaaatgatggaaaaacttttttaaatttaagagcattttgattgtatccggtcacagaaggtgctatattaatggtgaggaaagatagcttggtaagtgaaaccaagttagctttaaatagatttaccactttaaaacacaagcaccagatttgaatgtacgacacatcaagatttaaagtacgaaaaagaaattgcaaggcgtggttccaatggaaacataagtgtaactcttcgtagtattaagatctaagtatatcggaggctgatgtctgttaaagaatatcgctcaagtagtaaacacgaatttaatcgtcatcgctaaaactgcacatgcgggtcaaagatagacgaccaaactagatcgagtgaaacgattagcagtgggctagaccaacgattaaaaacaattgaataaagtatgaggtgtaacattatccagaatgtaaaacagaatcagctcgtaacaaccaagctatcaacctcaacctaggggattcaagcatatcaaagcttgaatccttttttttatgctcaaaatacaatataaatagccattcactatagataacaaatgaatggctttatttttaattaggcgtgggcttgcactgcctcaatcaacgcgtctaaattattcacaatcgtgccgttttgtttaattaagccggttgtgtaaaggtttaagtaatggaattggttttcggcgatctcttgtaaagccgctagtttttgtggatttgtagcaccttgttggcggctgtcggtgtataatccgatcattggaatttggcgaccgtatgccacaccgatttcactagcaacgccaacatcgatggtgggaccatccaaaacagcaatgacgagatcgctagcaacgagttcgtctgtatcggcttgtgcgatcatttcagagctggcataagcattcttgtcattaattgcggcgttttcttgtgggagatagatatcgacaccaggaatcgattggcgcagttgagcaacaaccttagcgttataatcaaagtctgctgctgagaatagagcgtttgcgaaataaattttcataagaattcctccaagttgatttcctttattgtatcaaattagtggtgaaatgctgtacaattaagttaatcagttttggaaggggattcacaatgcgcgagattcaagaaacaccagggcaagtaacgtttaagtcagcttggcgagattattttaaaggttattttgattttacggggcgaacaacacgtgcgggttattggtgggcgatgttgattttaatgattgtttggttcatgccatttttcgctttgctatttgcacaagctgcaaaggtgcaactgaagatgagcggtgcattagtgctgtacataatcgttatcgggttgcttggggtactcacgtttattccaacgttggcgcttagtgtacggcgttatcgggatgctgggttaaatggtcgcggagcagttgtattgtggttattgaacgggtttgcatcccgttttacatcgggcaatcaggggcgcgcatggacgttaatttcggcgttgatcggtttaactttatttataatcacgttattgaaaacagacacgattacaaccaacagcgacaatccactagttgctttcttcttaagaaagagtgcgtcacaaccgaaacggtctgagcattaacgaagtttggcgaatgattgtgaagcaatcgtttgccattcagggttaaccggaaggatatgacttatagaacacgtttaggcgattaaagtccaaataaaaaagcggtccatcaacaaacacatgttgatggaccgcttttttgcgttataggtcgcgttttagtgttaatgtcacaactgcttcaactcgtgccgtttgggggaacatgtccaatggttggattttttccacttggtacgtatgcacaagggcttttaaatcccgtgcaagggttgatggattacatgagacgtagacaaatttcaatggccgactgtctaaaatggcatcaattaatttttgatctaagccagtgcgtggtgggtcaaccaccaaggcagttgggacaaagccattatccaaccattctgggaggaggtcttcggcagcccctacggcatattcaacgttttgaatgtcattgatggctgcgttgtgtttagccgcttcaattgaatcggcaatcgtgtccatgccgcgtacttctgcgacttgattggcaagactcaagccaattgtacccaccccacaataagcatcgacgaggcgatcttcaggtgtgagatcaagtgcatcttgaactaagttatacatcttagccgtttgaactgggttcaattggaaaaaggcgcgggcagtcaattcgaagtgaacgccgtttaaagtttccataatcgtttcttgaccagccagatgaatcgtttggtcgccccaaacgagcacgtttttccctttgttgatattttgcatgattgaaaccacttcgggcaattcagcttggatggctgtaatcaaggcgtgcttttgcggtagtttaggggagttggtaatgaaggtcagttgcgcttcaccggttgaaaaagattcgcgaacgaccaatgtttttaaaatcccggcattcttagtttcatcaaagacgggaattccgagtgattcgactaatttcaagacggttcggatgattttcattgttaaatcggtttgggttgcgaattcaggcaaatcaattaaagtatggctacttggagcgtataagccagctgctaaatgaccgtcgatttcgcggacttggaattgtgctttgttgcgataatgccaggggttttccattccgactgtatcggtaatattgtatttggcgtagccttgtggtttgaatttttcaagcgcttggacgacgacgtcttttttgaaggcaagttggccaggatagcttaagtgttcaagctcaatcccaccgacttggccgtaagtggcatccttaggggtaacccgttgtggtgaagcttggcgaagtttgtggacttttgcttcaatgaaacgaggggcaacgttggtgacttctgcgacaaccacttcttcaggaagtgcgcctggaataaagacaattttgcgtttgtaatagccaatcccttcaccattgatgccgattcgtttaatcgtcaatggaaaacgttggccgacttcgacttggtttgtttgttctggcatttaatccgctcctattaatataaaataatgatactcgtttttctcattgcattcagtataacagacttagcactgaaaaatcgcttcaatagtgggaattaagcagtgacttttgtccgggtgcgccatttatgctatgctacaggaagtcaaagtaaggagcgaagccacatgaatttttgggaacgaaatcaatttttaatcgccatgctgattgtactcggaattggcgtttatgccttccaacacaagagcttaccactgatcatcgggactttagtgctcgccgtcgtggtcattggatttaaagtctatttaaacatcaaagcaacacgtaacaagggagaataacatgccgaagattaccaaaataacggcacagaaaaaatcaggccgttataatatttttatcgatgagcaattcgctttcggcgtgaccgagagtgtcttgattaaataccgtttagcaaaggatttagagattgatagtcaactgcaacgcgacattcaaaaagacgatgataatgccaaagcgtatcaattggcgctcaattatctgagtcaccaattgcggacggaaaaggaactaacgcaatatttacgcgaacacgagatcactccagaagggatccagactagcttggcaaaactacgcgagttacattatatcgacgatcaggattacgccgatagctacgttcgtactgtgattaataccgcggataagggccccaaagtggtccgccagaaattaatccaaaaaggcgttagtgctgcccatatcgatcaagcacttagtcattattcagtggatgatcaagttgcggttgggttagcagctgctaagaagttggcgaagaaataccgtcatagttcattctttgaacagcagcaaaaagtcaaacaaggtttaatgcaaaaagggtttggcggtgacagccttagtttaattattgaagcgttggcccttgaagccgatgaagatagtgaagctgacgcgcttgctgaacttggtgcaaaaaaatggcgccgttatcgattactcgaaccacgagaacgccggatgaagatgcaacaagcgttgtatcggaaaggatttaatattgatgcaatcaaccacttcatcgacgaacaagaactatcagatgacaccgagtgaacggggcgcgtttcaaaccgcgtttatgacttggtatgatgaaaatcgccgggacttgccttggcgccagaatcaagagccctatcgtgtctggctatctgaaatcatgctccagcaaacgcaggttcaaacagtgattccgtactatgaacggtttttggcgacttttccaacggtggcagacttagcggccgctccagaggacttattaatgaaaacgtgggagggacttggttattattcgcgcgcgcgtaacttacaaaaagcagcgcgccaagtcgtcgacgattacaatggtcagtggccaacaaccgcggctgaattagaaaagttagccgggattggaccgtacacagcgggcgctatcgccagtatttgttttggcgaagtcgtcccggcaatcgatggcaatgcttttcgggtgttcagtcggttattgaaaatcgatgctgatattgccaacccaaagaaccgccacattttttacgatgcgattttaccgctgattcccaaagatcgcccaggtgactttaaccaagccgtgatggattttggctcgcaagtttgtacggcaaagaatccaacggttggtgagacggcgttagcaccgtttttccggagttatcaagatggcaccttattggattatccagtcaagacgaagaaagcaaaacaaaaaccggttgcgatgtttgcagttgtgattcgctcgcaaaagggcttattatttcaaaaacgaccgagtaccggtttattagcgaacctgtccacttatccactagtcgctgcggaagacttgcaagtaactgacgatgaattattgacaccggaagaacaattagctcgtatcgaaacttattttaaagaggcttttgcactagaattgcagcaattacatgaatcaggtttaaaacctgtggtgcacgtttttacgcatcttaaatggacaattacccttttagaagcacaacttgcagcagatgccgacctcgcctttttcccaggccaatggtataccgaggcacaattagctgacgttgcattaccgactgtgcaaaagaagttagcggcacgtttggcaaccaattaatggtagaaagttttaggtaaatttgcgagtctttgctataatgatagatgattatgaataataaccttggaaagctgggtatgtcgatgagtattcccaaagaaggcgactatatagcgattcaaagttataaacacgatgggagtttacaccgcacttggcgcgatacgatggttttgaaaaccagcgagaacgcagtcattggttgtaacgatcataccttagttacagagtcagacggcagaaagtgggtcacgcgggagccggcacttatttatttccataagaagtattggtttaacgtggtggcaatgattcgtgagggcggcgtttcttattattgtaatttggcatcgccgcatgtcatggatcaagaggcgcttaagtatatcgattatgatttagatgtgaaggttttccccaatggcgaaaaacggcttctagatgtcgatgaatatgaagcgcacagtgcgcaatggcattattccgccgaaactgatcggattttaaaagccaacgttaaggttttggttgattggatcaacaatggcaaagggcccttttcgaaggaatacattgatatttggtataaccggtatcaagaattggcgcaccgtcgttagaacactatttagtctcaagcaaaaaagccccagtcattgattgactggagcttttttgtatgggttaatcgttttcgactgaagtatcttgttgaatcgttaatgttttaaagccgatgccagcaccgatgctgatggatagcaaaagcgcgaagacgcaccagccgagtaaactaccagcaatgatgttgagtggtaagaagtggcgtaacagataggttgcaaggcagaaaagaatgccatcaaaaatgaagttagcaatcttaataccaagtgaacgttctactaggaagaaacttgttaccattttaagtgtttggttaggggctaagtcagccataatcgtcaacggtcgttcgattggaactttaataaataacattagggtgctgctgattagagcactgaacaaggtgcgatcccaagtggcactgtgaatcacaagactgtcgtaagccgttgcggcaatcgtaatgacgagtagataagggataatgaagaaaaataagtggacaagaagtgatttttgcttaggcatggtaacgtcctttctgttattaagctgtgttcattataagtcatttagtggtgaaatgacaattagtcagttaattttttaaccatttcttgatgcataatcccggcatctaggaactgtggtttggcggttgcttgaaaattaagctgcgtatagaacggtactgcacttaattgagcatttaaagtgagcgttgctttgcctgattcccgagcaaaaacttcagcggcacgcatcagttcttgaccataaccatgatgccgtgctgaacggctaactgcgacacgttgaacatgataatctgagtccgcttcgatgagccgcaacgtcacaacggcttgatcagcaacgtagccgacaaaataaatcgcttggtcttcgaattcatcaatctcaagttcagcaggcacgtgttgttcaacaatgaatacggcttgccgaattgccaaactatcttgataaaccgtactttttaaatcacgagtttgtttcactaacattaaaaaaccacctcttcaaaaggaataatcaatgtgtatcactataaaatttggtacaataacaataatcgttacactatgatagcataaaatgcgttttgtgtgacataggcacactggggggatactgcatgtttgatcgtttacgccaatcaaaactattattttggtcaattgagcttttgattttggctgtgttaatctttgtttgcaccaaaattagtttcttatttgatccaattggcacctttatttcaactttatttgggccaattattggcgcgggactattattttacctgtttaacccgctaatcaatctgttaggtaaactcaaaatatcacgcaactgggcgattacgattatcttcatcgtcttttttggcggtttaattttcattgtagccactgtgattcctaacttgattaaacaaatcacacaacttgtgacgaacctaccagattttgctcatcgactgcaaaaagtagcggatgatttatctagcaatccgcgcttgaaaaacattgacttcaataaatacgtcaatcagttagatttaaaaccatcgaagattgctgaaaaagttatgaagagtttcacatctggttttggtagtatgattggtgcgattacgagcgttacagttagtgtcttcacgattccaattatgttgttctatatgttaaaagacggacaccgtttagtgcctaatattcaaaagatgttacctgatcgttataacgaccaagtggcggacttgcttcggaagatgggggcgacgatttcagcttatatcggtggtcaagctctagagtgtttattcgttggcgtctttacatttattggttatctcattatcgggatgccatacgcttatttgttaggatttattgctggcgtttctaacgtaattccatacttagggccttatattgggattgcgcccgcgttgattatcagtttatcaatttcgattcccaaaacaatcatggtgattgttgtcgtcattgttgttcaacaaatcgatgggaacttgatttatcctaacgtgattggccgttcattagatattcatccgctaaccatcatcattatcttattggtcgctgggaatatttatgggattttaggcatgattttagcgattccgttttatgctgttaccaagacagtgattacttatttatatgatattcaagcgttacggactaaagctaaaaaagggaccgacctttaaaagatgcaggttgaatttccatttttgactatgctatactgcaaggtaggccatattcggctaaatgtacttatttagataatgaaaggtagtggatgtgacgatgaatcctgaccctggaagttcggtgtggggacagttactgttgatattaattttgaccttagtgaatgctttttttgctgcggcagaaattgcacttgtgtcactaagtcgtgtgaagatggaggagcaagccaataaaggtgacaagaaggcgcgagtattagttcaagtcttaggtcattccaatcagtttttagcaacaattcaagttgcgattacgtttgcgggcttcttatcttcagcgagtgctgccacaaccattgcgggtagattagcaccccttttaggaaatgcggcttggacaaaggaagcggccgtattaattgtgacgattgtcttatcctatgtatccctggtttttggggaattatatcctaagcaagttgcactgcatcgtgcagaagcaattgctaaaataacggtgcaacccgtgcggatcgtcggtatcttactgcgaccattcgtgtggttgctatcaatgtcgacctcgctcttaatgaagttgacaccaattgatttttcagaaacagaaccgaagctcacccgagaagaaatggtccacatgattgaatctgggaagagtgccggtgttctggaaaccgatgaatacgaaatgttagaggggattattaccctcaataagaagatggcgcgcgaagtcatggtaccgcggactgatgcatttatgattgatatttgtgcagacaacgatcaaaacatcgatgccatcttagcccaaccattctcccgcattccggtttatcgggatgataaggatcaagtggtgggggtcgtgcatatcaagaatctcttgaaagaagcacgccaaaaaggttttcaggccatgcaaatcgaagcggtaatgaaagaacctctttttgttcccgaaacgattacaattgatgatttattatttgaaatgaaacgcacacagcaacaaatggcaattctgttggatgaatacggtggcgttgttggcttagccacgattgaagatttattggaagaaattgttggtgaaatcgatgatgaatctgataaagctgaagaattgtaccaaaaaattgatgcgcagcattacaccgttatgggaagtatgccaatcaatgaatttaacagtgccttcaatacagatattcaagtcactgatgtggatacaattgccgggttcgtgattactgaaattggtgccattccagtcagtggtcatccggaaacaattgagctgccaggtggcatgagcttaacgacggggtcggtttccggttcacggttgattgatttacaattaacgttaccagaaccagagaccgatgcaccagaagaagtcgactaaattaaatgagcacaatcaatgggacaaagggtgacgcaatggttgcgcaattctttgtcccaagcgcattatattggaataacggaaaggattttataatgacacctactgaattaaaaacggcggttgatcgtcgtcgtacttttgcaattatttctcatccggatgctggtaaaacaacgattacggaacaactcttacttttcgggggcgtgattcgtcaagccggaacagttaaagggaaaaagagtggccaatttgccaagtccgattggatggaaattgaaaagcaacgtgggatttccgttaccagttctgtgatgcaatttgattatgacgacaagcggattaatattttggatacaccgggacatgaagatttctcagaagatacgtatcggactttgatggctgttgatgcggcggtcatggtcattgattctgctaaagggattgaaccacagaccaagaaattattcaaagtctgcaaaatgcgggggattccgattttcaccttcatgaataagttggatcgcgatggtcgtgaaccacttgatttgattgctgaattggaagaactattggacatcgaaggctgtgctatgaactggccaatcgggatgggaaaagacctccgtggcctttatgatatcgccaaccgtcgaatcgaactttatcgaccagaagacgaagccaacccttatttggcccttgatgaagcaggtcggattgccggtgataatccattgaaagaagattctgtttacacacaagcccttgatgatatcgaattgatcggtgaagcaggcaatgcctatgatgctgataagattgcaacgggtgaacaaacaccaatcttctttggctctgctttgactaactttggggttaagacgttcttagaatcattcgttaacttagcgcctgccccagaagcacacaaaacacaagaagaaacgttggttgaaccaacctctcctgatttctcagggttcatcttcaagattcaagccaatatgaatccagctcatcgtgaccggattgcgttcgtacgaatttgttcgggtgaattccaacgcggaattgatgtcacattgacgcgaacaggcaagaagatgcggttgaacaattcaactgagttcatggccgacacacgggaacaagtgacaagcgctgttgctggcgatattgttggattatatgataccgggaatttccaaattggggatacgattcacacgggtaaagaggctgtttcatttgagaaactccctcaatttacccctgaattattcatgcgcgtcactgccaagaacgtgatgaaacaaaagtccttccataaagggattcaacagttggttcaagaaggggcgattcagttgtataagacttacacaactggcgattatatcttaggcgccgttggtcaattacaatttgaagtgttccaatatcggatgcaacacgaatataattctgaagtattgatggatccaatcggttcaagaactgcgcggtggatcaatccagaacaattggatgaacggatgtcatcctcacgaaatctattggtaaaagatattcatgacgaaccattgttcttatttgaaaatcaatttgcagaacgttggttccaagataagtatccagacgttgaattaaccgcaaaactataatataaagagtcaaacaaaaataagccgccgattcagacacactaactgttgtctgaatcggcggcttattttttttaggggggtatttagtcaaaagttaggaggccttccattaaccactgacctgttttaagttgacaccagcgactttgattatcgagtacaacgacttgcttaacgactacccgtgttttaggcactatctgatatgttgtgggttggtcatacggtgcttgccaaaatgttacggtattgttgttcagacttgcactgaggtttagaggggttgtttcgataactgcgtaatggtaggtgaactttggtacttggtatgattcatcactgcctttaggattagtggcatgtaattgataacgcgtaggggtaatccaagaactgccaagattgaaccattgtttgccagatggagcagttgcacagctataaatcttccaaaccgcgtgctttggcaagcgagcagcagtcagcgcttcttcacttggttgctgataggtatccgttggctcaagaagttcgatgaagggctgttcaggtgcatcgctgtgttttaaattcagcggatcatatttaaaatggacaaactgtgtcttagttgtaaagcgaccagtctgattagctgaggtgtggtgcacgaagttagcaccaccttctagtggattggcttgatagtgttcgttcaaagcacctgataaaaattggggcttaatcaacaagccaccttctaaattctggtgtaacaccattactggtgctgcgagttgcggtttataaaaaagccagatagtggtgttttcttcaggaaactgttgttttaaattggtaatagctgccaagtaataaccggcaaattttagccatggcaaattgagcacggtacccacttcacctgtcagggtcatcgttggtcgtaaagggacccgatgatgatcgaggtagtgaatggtaactgtgctatggcgcggttgtgtggacatcgtagccagcagtggcgttgcgtcctgactaacgggaacgaccggctgtttctgtgacgattgaggcgcttgacggatgggctcttgctcagagacagtttggcgtacatgactgttcggtagaggagctgcttttttcgggcgccatttcaataacgattgaagcaggttaatcagattcatacggactccttgtagcgcattacttattactactagtctatcataaattacaaaaagtgtggttgataattaacgcgtcaagtgggcataaaaaagaacccctgcaaaaatagcagtgattctaatcgtttaaatatctaatacttgtaatttagttgcagtatgggtgacgcggccgatggaaacgggaattaaggaaacgattaattctcctgtacgtgaaatgacggcgcgttctagatgcccaccaaaaacgcttgtatctaaacgggcaaagcttgcatgtagatggacatcaatcgtgccatttgcattttcgacattcccactaagggccagcagttctacttgctcttgactggaagtggcaatatattgatccgtttctggtgaataaacgctgacggtaacttcatcacaggcaccaatccccgtgatagttcccagttggttggggaaggttgcggccaaatatttaagttctgttaggatttcgtcgcccacttctaaccggcaaataatttggtgctctttttgaaaagtcttcatcgcgtcattaatcctcctaaattaggttgaaagttattatacgatacgacctattcaattgccattattttgcctatgtaaaaaaccgccccaacaaaatgaaatgtcggggcggttcgaatgattaactcactgtttttgaaggtgttggaattgtaatttcgactaatggaccatcattcaagacttcaaggccatctgtggaatctaaaccggcgagttccttcaatacaaaatcgatctcggcttgttggacatgtcgatgatcattttttaaaaggagctcacgttccttcgatgaacgcgagtcaagaaccgttgttttaccaagtgaataaaccttaacgtaggttgcggctgttgcagcgagttgttgtgaaacaagtcgcttataagaattggttacattgattaagcgcatctaaatcactccctggatgtttaagtcttaccactagtataactgaaaacgcttcatttggcacgtaattcgttttaacttgagataataaagccttttaatctgtgacctgtgactctttagcatcggtgatttgaatctgatcttccaccaaccgagccgtcaattgtttatgttctgggtgatcgagataatagtcagccacgcgatcttcaatttgttcttgaataacacgtcgtaatggacgcgcacccatctctggattgtaaccaagatcgacaagccgtgatttgactggttcagttacggcaatgtttaacccttggtcagcaatcatcgcatttgtttgatcgagcatcagactgacaatcttcaagagattttctttgcttaatggttggaactcgatgatatcatcaaaccggtttaaaaattcaggtttaaagtagttttgtagttggtttaaaatcgagtgtgtctgaccagaaagggttgccccgaaaccaacattggcttcggcatcagtttggccggcatttgaagtcatgatgatgatggtgtctttgaagctgaccgtccgtccttgtgaatccgtcagacgaccatcgtctaagatttgtaggaacatatgcatgacgtctggatgtgctttttcaacttcatccagtaagatcaagctgtatgggttgcgccgaacttgttcggttaattgacccgcttcttcatagccaacatagccaggaggtgatccaatcaattttgacacactgaatttctccatatattcgctcatatcaaaacgaatcatagcatctgtgctaccgaaaagttctttggcgatttgttttgctaattcagttttcccgaccccggttggtccaacgaataggaaagaaccgattggtcgaccggatttgttgaaaccaattcggttgcgacgaatggaacgggcaaccttatcgactgctgaatcttgaccaattacgtgcgcttcaagattttcagcaaggttcttcaactgtgcttgttcttgtgcctttaactcaccaactggaatgtgggttttttcttcaacgattttttccatatctttgtcggtgacggttggcatttcagattggtcaatggcacttgtttcgcgcatcttggtcaattttgtgacttgatcgcggtaataagcggccttttcgtaatcctcgtcctttaacgcactttgcttttcagcttccgcattttgtaatttcttttcgatttcttttggatcgacaacggtaatcgtcaagttcttcttagagccggtttcatcaagtaagtcgatggccttatctggtaagaaacgatcctggatataacgattagaaagggttgcagccgccttaagtgcctcgtctgtgtagtggacttggtgataggcttcgtatttatcttggagtccttttagaatttggactgtttcgtcaacagaaggttcattgactgaaacgggttggagacgacgggcgagggccgcgtctttttcaatttgtcggaattcattattcgttgtggcccctactagttggagttcaccacgggcgagggcgggttttaacacgttaccggcgtccatgccaccttcggcattaccggcgcccacaatttcatgaatttcatcaatgaagagaatgtattgcttattctgcttcaattcagtcatcagttgttgcatccgttgttcgaattgaccacgaataccggtcccttgaacaagtgaaacaacatctaagcgaatgacttgtttatccttaagtttggcaggaacgtcatcgtcggcaattttttgagctaagccttcgacaacggcggttttaccgaccccagcttcaccaattaatacgggattgttttttgtccgacggtttagaatttcaataacacgatcgatttcagcatcgcgaccgatcactggatcaatttggccagctttagctaagttggttaggtttacaccgtattgactgagcagactttcgccgttttgcccgttgttgccgccaccttggccgccactttgggtttgtggcccttggtttgcttgtgattgatcatcgggagttgcgcccattgctcggaagaaactatccaggcttccaaagccaaatggatctgcatattgcccttgtggtgcttggccattactgttttgttgtttcaagagttggtaacagttttgacaaagatcgatttcttgtcgttgaccattggtgcttgtatagagatgaatcgttgcaggattcttctggcagttttgacaaagcattaatctgtcacaacctttcattaataatagaatcgtcaaagtgttcttgactatctttgacctttatccaaattataatcatctctaaaaaaagttgcaagtcaggcaactcgaaaataaaagtttcttgtcaggtatgggcggtatgcggtagtatgaggtcatcgttttatttcgcagatggaatgaaaacgaatttttcaagccacgataaaagaattgcaaaggaggcagaatggcagatgcgtgattttttagcagagatggatgccttaataaataacgaacaaactgagattgaggttgctcagtccgaatttttagattttcagaaagtatgggtcaactatgaccatcgaaaagaaattgtgggcgaagcacaacgaaatggtgcggtaatctaccgcaagtctgaaagcggtatagtgtagacggctactaattttgttagcgaaactattgtagtattttaaaaaaaatggtaatcttaaatatcggaagggtagccactactagtgaccactcatttcgttaaaaactaaatctataattagataaaaggggatcgattaatatggaaaaacgcgattttcacgtagtagcagacacaggtatccacgcacgtccagctacattattagtacaaacagcaagcaaatttaactcagatgttaacttagaatacaaaggtaaatctgtaaacttgaagtcaatcatgggtgttatgtcactcggtgttggccaaggtgctgacgttactatctcagctgaaggtgctgacgaagcagacgcaatcaacgcaattgaagaaacaatgaaaaaggaaggtttatctgaataatgacaaaactaagagggattgctgccagtgatggtatcgctacggcgaaagcctatatgttagtgcaacccgatttgtcattttcgaaatcaactatttcagattcagaaaaagagattaatcgtttgcataatgccttacaagcttccacgagtgatctagagaccattcggaagattgctgctggatcactaggggaagaagaagcacaagtttttgatgcccacatgatgattttagcagacccagaatttaccggcgctatcgaaggtaaaatcaatgatgacaaggttaatgctgagcaagcgctcaaagagatcgcggatttattcgtggccacttttgaggctatgactgataacgcatacatgcaagaacgcgctgctgacatcaaggatgttactaagcgagttctcagtcatttattaggggtaacactccctaacccagcgttaattgatgaagaagtaattgtgattgctcatgacttgacaccaagtgacacagcccaattaaacggtaaattcgttaaggcttttgtgactgatattggtggtcggacttctcactctgctattatggctcgttctttagaaattcctgcaattgttgggactgaaaatatcacaacttctgttaaagccggcgaacaattaattgtcgacgggattaacggggatgttattatcaatcctacagatgcagacattgctgaatacgataagaaggcgcaagctttcgctgatcaaaaagcagaatgggaaaagttaaagaatgaaaaatccgttacaaaagacggaaaaacattcacagttgctgcaaatatcgggacacctaaagatttagatggtgttatcgataacggtgctgaagcaatcggcttataccggacagaattcttatacatggactcatctgaattacctagtgaagatgatcagttcgaagcttataagactgttttggaaggtatggctggtaaaccagttgttgtgcggacaatggacattggtggggataagaaattaccttacttgccattacccgaagaaatgaatccattcttaggctaccgtgctgtgcggattagtttagatcgtgatgatattttcagaacacaattgcgtgctttactccgtgcttcaaactacggtaagttacgtatcatgttcccaatgatcgcaactatcgcagaattccgtcaagcaaaaggcattcttgaagaagaaaaagctaaattaattgctgatggtcaaactgtttctgatgatttacaagttgggatgatggttgaaattccagccagcgccgtcttggcaaatcaattcgctaaggaagttgacttctttagtatcggaacaaacgacttgattcaatacacaatggctgctgatcggatgaatgaacgtgtatcatacctttatcaaccatacaatccagcaatcttacgtttaattaagaacgttattgacgcttctcataaagaaggtaagtggactggaatgtgtggggaagccgctggcgattcagtcatggcaccactccttgttggaatgggcttagatgaattttcaatgagcgcaacttcggtccttcgggttcggagcttgatgaaacgtttagatacaactcaattaactgatttagttgaaaccgctgttaatgtgaatataagtaatgaagaaaaccaaaaattagttgaagattttatgcaaaatctttaattaaatggtaaaagaccgcccactgtggcggtctttttttgtgcgtaaaatgtggatgagcaaaaaagattgacagttatcgattacaaatgtaaactgtaactaatgattacaaatgtaaacgaaagggagaaaaccgcgaatgactgaaaaaataggggttattacggatgccgaatgggaaattatgcggatggtttggtcacttgggcaagtcaacagcagtcatttaattgaactcgttcagcaaaagcgtgattggcaagcgtcgactgttaagactttggtaggtcggttggttaaaaaagactatttaattgccactaaagaagggcgccgatttatatatacggccaatatcgcagaagatgaagcgatgaaccatgccacgcagtcgctgtttaaccaattgtgtgggatgaaaaaaggccgcacattagccactttaattgagcaaacaacgctcagtcaagatgatattcagacgttacaaacggtgttagcggctaaattacctagtgcaccaacaatgattgaatgtgattgtttaccagccaattgtgattgcatagaggaggaagtaaaatgaaacacgatgaaatgcaccacgaacatgaaggacatgatatgaaagagatgcagcatgaacatcagatggaccacagcatgcacgacatgcatcatgaccacgagatgatggatcatgatatggggcatatgaatcacgatatgcatgggatgcaccatgacatgggcgacggcgatatgatgatgcatggtggtcatatgatgcacatgggaaatctgaaacaaaaattctggatttcattaattgcaacggtaccaattctaattctctcaccatttatgggcatgcagttaccttttcaaacgactttcccaggttcagattggctagtattgattttagcaacatttctcttcttttacggtggggcaccgtttttaaagggcgctcaaggagaattatctgctaagagcccagcgatgatgaccttaattgcaatggggatcagtgtttcttatctatatagtttatacgcctttgttgcgaaccatttcttgaacccacaaggccacgtgatggactttttctgggagcttgcaacgttaatcgtcattatgttgttgggacactggattgaaatgaatgcggtaatgagtgcagggagtgctttagaaaaaatggctgctttgttacccggccaagcacaagtaattgatcaagcagggcatcaacacgcggttgatttaaaggacttgaaaaaaggacaaactgtattagtcgcagctggtgaaaaagtacccgcggatgggttaattatcgccggtcaaagccaagtcaatgaatccttagtgacaggtgaatcaaaggctgttgtgaaggctgaaggcgatcaagtaatcggtgggacagtcaatggaaatgggacgttaaccgtgcaagtgaccgggactggcgaaagtggttacttagcgcaagtcatgaaattaattaaacaagcacaacaagaaaaatcaaaagttgaagggttagcagataaagttgcgaagtatcttttctatgctgcattggttgctgggattatcgccttcattagttgggtgttcttggccgatctgaatacggcttttgaacggatggtaaccgtctttattattgcttgtccgcatgcacttggattggccattccattggtggttgccagaagtacagcgattgcggctacaaacggcttgctcattcgtaaccgtgaagcaatcgaattgtcagataaggttaccgttgttttgatggataagacggggactttgacacaaggtgcattcaaagtgaatgctgtcgaagttttcgatacagcacttgatgaacaacgactcatgcaattctttggtgcgttagaacgccattcaagtcatccattggccactgggattctagagtataaccaagcacaaactattcctgatttacaggcagacaatgttcaaacgattcaaggcgtcggtttgtctggaacggttgcagggcaaagttatcaaatagtgacggcaacttatttacaagcccagcatattaaatttgatcaagctcttttccaaactttagcagaaaaagggaattccatcagttatctattacaagatcaaacggttttaggactagtcgcacaaggtgatcagattaaaccagaagcgccagctttcatccaagcattaaagaaacggcatatccaaccggtcatgttaaccggtgataatcaacaagttgccgaaaaagtggctgcacaattgggcggtatgacggttcaagcgaacttgaaaccagaagataaagaagcaattgtcaaagattaccaagctaaaggcgaagtcgtcctgatggttggggatggtgttaatgatgcaccaggtttaacgcgggctgatatcggaatcgcaattggtgctgggacggatgttgcaatcgattcagcagatgtgatcctcgtgaagagtaatccaaacgatattatgcatttcttgaatttatcgcacgcaactaaccgcaaaatgacgcaaaatctctggtggggcgctggttataatattttagcgattccattagctggggggctatttgccggaattgggttagtattaagtccagcagttggtgcaatcttaatgtcactctcaacaattgttgtggctattaatgcaatgactttgaaattaaaacgagatgcatgatgtcaatctttttttaagcagtatgaagtagatttcgataaggacgggcgaaagaaaatatcgcacacaattagacgcacacaacatatagttgtagtgcgtctttttgttggtttatctactatatataggttgaatctgaatttttaatccgctatgatggggttactgattcaaaaggagactggtgctaagatggatatgaaaattgcttcagaagcagacttgcaaattaaagtgattaaaagagatgggcgaatcatgcctttttctgcggataaaatcgaacaagcaattattaaagccgctaaaaatgtgaagacggaattagagccattagactatcaagtgttaaacacagtcgcactagatgttgtgagtgaagtcggcagccgatttgataaagatgttaaaatctatgaactgcaaaatattgtggaacataaacttttagaacatcaccaatatgatattgcccaagaatacattaactaccggacgcaacgggactttgcccggaataaggcaactgatatcaactttaccattcaaaaattattgaaaaaagaccaaactgtggtcaatgaaaatgcgaataaagatagtcatgtttttaatacacagcgggacctaacggcagggacagttgctaaagcgatggggcttaagatgttgcctgataaagtggcgaacgcccatttaaaaggcgagattcattggcacgatttggattaccaaccatatagtccaatgaccaattgttgtttaatcgattttaaagaaatgttgaatcatggctttaagattgggaatgccgaagttgaagcgccacattcgattcaaactgctacggcacaaatgtcacaaattattgctaacgttgcttctagtcaatatggtggttgttccgctgatcgggtggatgaattattggcaccatttgccgaaaagaattatgccaaacatttagcagatgccaagaattggattgatggcgaagcaaaacaaaaggattatgcgcaaaccaagactgaaaaagatatttatgacgccatgcaagcgttggaatatgaaatcaatactttatattcatcccaaggccaaacaccatttacaacgcttggttttggattaggcagtaactggattgaacgtgcgattcaaaaagcaattctttcaattcgaattgaaggattaggtaaagaaaaacggactgccatcttccctaaattagtttttgcagtaaaacgcggcttaaacttaaatccaactgatccaaattatgacatcaaacaattagctgttgaatgtgccacaaaacggatgtatcccgatgttttaatgtatgacaagttggtggaattaacgggttctttcaaagcaccaatgggttgtcgaagcttcttacaaggctggaaaaacgaacatggtgaagaagtgaatagtggccggatgaatctcggcgtggtgacaatcaatttaccacggattgcacttgaagctgatggcaaccaagctaagttctgggaaattctagaacaacggttgcaagtctgcaaggaagccctggtctttaaagtggaacgcgctaaagaagcgaagccagaaaatgcgccgattctttatgaatatggtgcctttggcaagcgtttgaagaaaaccgatagtgttgatgaagtctttaaaaattcacgcgcaactgtttcattgggctatattggcctttatgaagtcggtacagccttctttgggccagactgggaaaaggatgccaaggcaaaagcctttacggtagacgtcgttaaagacctctataatcactgcgttgattgggaaaaggaatacggctatcacttctctgtttacagcacaccagcagaaagtttaacaaatacgttctgtcaaaaagatacgcaaaaatttggcattgtcgaaaatattacagacaaagaatactacacaaatagtttccactacgatgtgcgtaaagcaccaaccccatttgaaaaattagattttgaaaaagattatccaaaatactgttctggtgggttcattcattactgtgaatacccaaatctgcgtcaaaatccaaaggctttagaagctgtctgggattatgcttacgatcgtgtcggctacttaggcacgaatacgccaattgatcaatgctttaaatgtgggtttaaaggggactttaagccgacagaacgcgggttccaatgcccacaatgtgggaacacggatgctgctacatgtgacgtcgttaagcggacttgtggttatctaggcaatccacaacaacgtccaatggtgcatggtcggcataaggaaatcgccagtcgagttaagcacatgcatattaccattggcaacgataataacaacgttgcacggcagtaattgtgaatacgggatttgaaggagtttttgaagatggcagtaaaacaacaaggcccgaagaatccggcgcccaaagaatggctttctgaaacactaagccaggattatattgcagattataaaccgtttaactttgttgatggcgaaggggtgcgctgtagcctatatgtgagtggttgcatgtttgcttgccccggttgttacaatcgagtggcgcagaattttcgctatggccgcccttatacaactgaattagaagaccaaattattgctgatttagggcaatcttatgtccaaggactgacgttattaggtggcgaaccgttcttgaataccaagacttgtttatcgctagtagaccgaattcgcgccacttatgggcagacaaaagacgtctggtcatggacgggatatacgtgggaagaactgatgcaagaatcagatgataaactcgagttgctgtctaagattgatatcttagttgatgggcgcttcatgaaggaccaaatggatttgacattgcaattcagagggagtgccaatcaacggattatcgatgtcaaaaaatcattagccgctaaaaagcccgttatatgggcaaagcttgttcattgaaagtaatatgtaaaataaagttattaaaaatttaattttcattttccgtcattggtatatacctaacacggataaaaaagagcgtcaatccatgattagaatgggttggcgctttttttagtttttgtgaaaaactggacattcataggtaatgaacggggttatcgtttgacaacgctttctgtaacataatacttgtaatagcaattattttttaattatgattcaggaaaaggagtgaggttaatggattcatttatcagtttcatggagaaacgctttttaccagttgtggcaaaagttgggaatcaacgacatttgccattcgtgatgccttcgtaacaacgatgccattgatgatcttgggggcttttgcaaccttgattaataatttaccaattccggcatataccaatttcatggatagtgtgttctcaaagacagttggtaagggcgctgaaaaggcttatatctggactaaattcgggggcaatgcttggagcgggatatttgcgattctttctgtgtttatcgtcttcctagttgcttacaatttaggtaagtcatataatatcaatccactagcagccggcgtaacagcattagggtcattctttgctgctggcggtcttgcagggatggactcaatgggcttgttcgttgctttaatcgttgcgatgatttcaacagaaattctcagacgtttattgggtaataaacacttagtcattaagatgcctgatggggtaccacctgcagtttcacaatcattcgcggcattattgccatcaatgattaccatcgcagtcttctcattatttgcaacaattctattaggctttggtgttgaaaatattgtgacatcattctacaaagccgtccaagaaccattccaaggacttgcaaacagctatccttcagcattattattagcattcatcacaccattcttatggttcttcgggttacacggtgctaacatgatcgaaccattcatgcaaacaatcaatgcacctgcaattacagctaacttaaatgcgattaaagctggtaaagcagcaccatatattgttaacaaaccattctttgattcatttgttaacttaggtgggactggtgctactttaggcttaatcattgcaatctggttagtgggtcgaaagaataaacaatattcaatcgttgggaatttgagtgccgctcctggggtcttcaatattaacgaaccattaacatttggcttgcaatcgtattgaacccaattttattcatcccatatattgccacaccaatggtgatcgttacaattgcatactttgcaactagcaccgggttagtgcccgctgcaacggttatgccaccttgggtaacaccaccaattatcggtggggtcatcgcaacggttagttggcaaggtggggtattagcagcagtgaacttacttgtttcagtgctcatttacctaccattcatcaagatcgccacagacatggctttaaaagaagaagcagcccgcgatcaagcggcttaagcacaaaaaaaggtccgacattcatgtcggaccttttttttgtgcctataattaatgagttgactcacttgcaatggtgacgtgcccgttttgaacgctaccaatgacgatattgttcgaaatctggtcagcggttgcatcggttagatagttgacactatcactcatcccgacaacagcgggacctgctttgaccgtaatggttgaagctgattcaccaggcttttgttgatcaagttgctcaaaaatggtttgatcagtctgtgataaatcggcagtagctactagtgaatccgtcttttgatagcttgttacttgaccagcaccgatgcgtagcagttcatgatcattcatgaagaggtagagataaccgatactatcaccactagcaatcgacttaggggttaattgataaccagcttgtgctgcatcccttttttgagcagcatagattgtattttgattgagcgttactaaagtgtatttggcaagatcttgaatggcagagcgttcaatactatcataacgtttttggtacatgaagccatctttgaccatcagttttccggtgtcattagcactcgtcgttgttgcggccgcaatccaagtgccattgagttggtcgagggcaacaggactggcggttgttttggcggttgctttttgactgacgaataactgtccgcggtcaaaattggtgggttcttgtatatctctgtaatgagctgtaattgcgtatagatgatttcctttggcaacgaatccttggtcaattgtatttttcccagtcttagtctcaagaaagacgagatctgagaggtgtttaatcttaaagtcagcccccaatttgtgtaatgcagcgttgacttgtgccacagtcatcagatggagtgtcttttgatagctcttcatcagatgactgcggctatcttgttgccattttttaaacgaaatttgttgataattaatcggctgacttgtgaaggtgcctttagaggtcagccaacttttaggagtggtcatttgagcaatatttgaaacggtgatgtcatcagaaagaccgtttttagtttgcttagaaaggagttgtttgttaaacaaccaagtctgtgaatcggtcgcgagggcttttttagttgttttccggttggcgtaggtcgtcgtagttggctgcgcgcgggatgtggttgatgaagccggttttttagcttggcaacctgctaggagtgttattgttaaaagggtagtgattaaaagtgttttacgcattttgaagctccgtttcatttgtctgcaggatgggttttgccgaataagccgtcatcgtcatccgtgttgtagtaacttaaaaaaggaaagagtaatttaaaagtggaaccactgccttgttgggagctaacggtgagttcgtgaccgagcttttcacttaaggcacgtgcaagatagagccctaaaccggttgaacgttggttagaatagcgcccattttgaccggtgaaccctttatcaaaaattcggggtaggtcttcagccggaatcccaatccctgtatcgatgacacttaaccaaacgccttgttcgtcacgttcaatctgaaccgtaatttgtgcgccatctggggtatactttaacgcattggaaatgatttgattcaaaataaaagccagccatttagcatcggttaagacggtttgatcggcaccaagcagtttaaattggatgtgtttttgaataaaataattgcgattttggcggatgatttggttgactaaaggtttcaaatcgtattcctgcaccaagtaatccttagaaaaactatcgagacgcgagtagtagagcacttgttcaacgtagtgttcaatttgaatcagttcatcggttaattgattgaatttgtcttctggaatctggtcttcgatggattcaatgagcaattgagtagctgccagggggaccttgctttcgtgcacccagccatcaatgaaattcttttgatcttgttgcgctgagattagtcggtcgatgctttgttgatgataggctagcagttgattcacgtagtgttgaatgaattgtttttcagccgaggtagcgcctgtaagtggccagttgaggctatcttctttagcatctaagcgtgtttggattgtgcggtaccacttgagatggtagacgtataagccaaccaaaaaggcgcagaaaaaaagcgccagcaataaatcgaggtataaaagtgtcgccttagcaaagcgcatactagggtcgagccataggacgatatccagaacaatcataccgctgaagaaaaaagcgatatgaaataaatgatcacgtaagaattttttaaacgtcataataactccttaggggatgatatagccttggccaattttcgtctgaatgtagtcttctaaaccagcactttcaatttttttgcgaagccgattgatgttaacggttagtgtgttgtcgtcgacaaaccgttcatcgtcccagagggcacgcaataacttttcgcgactgacaatctggccgtgttgacgcatcagaaattggaggagcttatattcgtttttggaaagatcaatggtagtctcacccacctgagctccgccgctttggaggttaatcattaggccgttatgttcgatgatatcggcattttggtcgacgtagttgtaagtccgtcgtaagagggcgttaattttggcaattaaaacttccatcgaaaaaggtttattgacgaagtcatcgccgcccatgttcatcgacatcaccatgtccatgttggtactgcgactagaaatgaaaattatggggactttagatacttcacgaattttgcgacaccagtagaacccgtcataaacgggcaggttgatatcgagtaaaatcagatggggtttattggttaaaaattggtcgaaaatggtatcgaaatcggtcgtaatatttgcgtgtaattgccacttatttaagttctcagcgattaagttggcaatcgttggatcgtcttcaacaatcataatttcaaacataatgaattctcctcatacatagatagactaatactaaccactttcactagaaaagacaaccaactaaggtcgtagttataaaatgggcttttgcggtcaactctgctaaaatgaataccaattagttaagggatgtgaaaaaatggcagtcgtatcagtccaacaagtttcgaaagtctacgggcatcggtttagtctggtcaatgcgcttaataatatttcatttgatattgaaccgtgggagtttgtcggtattatgggcccttcaggcgctgggaaaacgaccttattaaatatgattgcgaccattgatcggccgacgcatggtcaagtgttaattaaagatcaagttgtgagtcggatgcgggaagctaagcttgctaattttaggcggcaagatttgggctttatttttcaagattttaacttactagattcactgacggttcgcgaaaacatgttactgccattagcgcttgataagttaagtgtgccagtgattgaaaaacggttggataaagttagccgagtcttgggcattagtagtttgttggatcgttatccggatgaagtttcaattggacagcgccaacgagtggcatgtgggcgcgcaatgattaccaatcccactttgttattggccgacgaaccaactggaagtttagattcaaaatcagctacggagcttttacaatatttaaccgtgattaatcgtcaggaaaagacgacaattttattggtcacgcatgatgcctttacagctagttactgtcggcgaattcttttcattaaagatggtcaattattctcggaaatcgttcgcaatggtgatcggcaacaattcttcaatcaaattattgatatgcaagcaaccataggtggaggaggccgtttcaatgctgttacacctaaccgttagaaatgcgattaatcatgcgcgcgactatgcggcttatgtgattgcctgtgttgccgcgattgtggtttatttctgctttacgtcgattcaaactgcgccaatctttaggcacctcaagatggctggtgaatctttagcttttggccggatgatccaagtagcaggtttaattattttgctgtttgccgcttttttcttggcatatgctaatttatttttcattaaaaggcgtcggcgggagattggtgttttaagtgtcatcggggtgactaaatttcagattagcttactcttcttctttgaaagtttgattatcggtgtgattgccctgattatcgggttgttattcgggattcttttttcgaaattattcgcgatgttattattacgcatgatggggattgcggttgccatgccgtttttaatatcatggcgggccattgaacaaacgacattcacctttggcgggttgttcctattaactggttttttaaacagtacgatgatttatcggtatcaattagtgacattgctgcaaccatctgcagtcagtcggaaagtgcgccgaccgaactggctgacttatttatgggggattattgcacctgtattgattatcagcggctattatttggcagaccaaacactggttttgatgccgagcttagagcggcgctatggttttgggattgatttggtttatttactaaccattttattacttgaaatttttggcacactggctttttttcaggcctatacgcaaatttggctacagttagaacggcactggaaacggctttattatcgtgggacacatttgttaaacgttacgaatttgagttttcgttttaaaaagaatgcaaagatgttgtggatgattacgattttaagtgcagtcactattaccgcaatcggaagtgcggcgatgatttatacgcacggtcaagatacattacggcagaacattccggtggatttggtttatacacaaagtcaaaaagcagcggtcgacaaaattttaacgcaatatcatgttcagccggttagtcaaacaatgtcttcgtttaaattggtggatgctcgatttaaggtcaattcaccgttaaatcgggaaggcatcaaaatggatggagcagctgttgtcatgccattatcccaatacaaccaagtaatggcgcaacaatttaagttaccagcaactaaattgaagaaaaatactgtggtgaccatcattaacttgccattaacaatgctgaagatgcctcgcagagcaggtgcaggtttgccaccgaaaagagctggaatcccgttgcaattaaaacagtctgggctttcagattttcggattgtacacattcgtaagctatttccaaacggttctgatgtcttctttgatggtaacttaaacgtgattgtggccaatgatgctgaatatcaacaagtccaagcaacttcagttgatcaaatctatgcagttcagctctccgctgcccaacaaaagcaaaaacgattaatgcgcgatttattccgtctatctcaaaagcccaaacaatgggattatttaatgacgcacaaaaaagccgggcaaacccattatgaaattaaaaccactgatcaacggctagaagagttaagccgctattctgtgcttttaaaaaaacctaaccgagatattgctaacgcaaacttcggattttatatgtatgtcgccatttttattgggttaatcttcatgttagccactggtagtatcatcatgttgaaacaattgtcagaagcacaagaagagattttgcagtataaaacattgaaaaaaattgggatgagtgacggtgagattaagcgcacgatttatttccaaattttgatgctctttttactgccaattattttgggatcgatgcacgccttctttgcaattcggttattgggtttgtttttagataatcctgggttacaattagcctatatcgtttgcggcctgtttatcatcatttactttgttttctatctaattacggccaatatctacaatcgaattgtgaatgcaccgctcaatagtgatgtgttctactaaactcggagggaaagtttttgcaattagctatgtaccgcgcaaaagcgcgtcaattattaaaaggaaactggcagaaaatggccgctttagtcgcgctttggttgttagttgagatagtagtcgactcaatgattgaaggcgtgtttggcgccagttcatttggttatcaaatgctcaacacctttgccaattatttcttatactttatctttttaaatgctgttttcttaggtgtttataaagttagccagaataagcccagctattaccgggataccttattgttattccggcaaccgttgtatacccatcttgtggtattgaatcttgttcaacaagtgttaaactggatcttactattaattgggttggcgccgttttatcggttactcggttgggatcgtgtatttcaattcacttttaatggattagattccgttgcgccttatttgctaaacattagccagcaggggacaatttctgaaactgtcttattgtttgtgacggtgatgttggttttgtcactgttgcaacccgtgattttaacgtattatcagattttagtactgttgaagtttgatttaccacaagcaccactcaaattaatctttagcctttcatgggtgattttaaaagggaactggctgaaattactcgggcttactttatcatttattggatgggaactggtcgtctatatgactgctggactaggtctcttgtggttctatccatacttaattatgagcgttacgattttctatcaagaagttaaagctaagaaagtccaagtcattcaatagcattagggccgtcatccatttgggtggcggtctttttttatttagttagtaaatatagtgcgcgcgatacccggaatgcgctactatagaaattagaaaggtggtcatttaaaaatgcaattaacagtcttaggttattacggtggatatccatacgccggtgttgggactagtagttatttattaacaagtggggcgtatcatttattgctagattgtgggagtggcgctttattagcgcttgagaaacaacttgacccattgcaactagatgtggtccttctcacgcactatcatcacgatcacattgctgatgtgggggttttacaatattattggcaactgcatcaaggaaccaaaaaggaacccattttacctatttacgggcatctgcaagatccactccactttggcagtttgacacaaccgggtgtgacgcagggctttggttatcaagaagacacagagctgaccctggggccgttgaaagtaactttcaaacggacagtgcatcctgtcccagcattcgctgttcgaattgaagaacaaacgacggggcaggtcttggtctttactgcagatacggcgtatttcccagaattagctgctttttgtcagtctgcagatttactgatgactgatacgaattttcttgaagatcgcactggtaaaatggcgcatatgacaacaacgcaatccggtaacttggcacaagaaagtggcgcagctaaaattctattaacgcatttaccacaaggggtttcggcagaaacgctacaggcacaagcacaagcgactgttggggacgtacccgtgatagttgcccaacaggatttgacaattgatgtcggagcgtgtaatataggcggcgttgatggaacttacaaaaaataagtgaattttcattagaaagtagaaactactataattttttttgaatgataaatataaatgtaaaaacataaaaattaatggtgagtgggaaaatttaacaataaaccgttttaattagacgttttatgtccaaatgtctatttattaattattaaaaaataattaataaatttaattttagggtagttttctagtgctgactcgcgtataataaaatttgtaagagagaaaatgattgtcttattgttaagtaaggtgtcatgttaataaaggagagagacatatggttacgttatatacatcaccaagttgtacatcttgtcgtaaagcccgggcgtggttagaagaacacaatattccataccaagaacgcaatatcttttcggagcctctcaataaaaatgaaattaaaacaatcttacgcatgaccgaagatggcacggaagaaattatctcaacgcgttctaaggttttccaagaattaaacattaaaattgatgacttatcaatcaacgaattattagatttagttcaaaagaacccagggctattacgtcgtccaattattttggatgaaaaacgacttcaggttggttataacgaagatgaaattcgtcgtttcttaccacgtgaagtacgggcattggaattacaacaagcacaattactagcaggattctagaggagagtcggggctgttaacagcctcgacttttttgatgggttaaaaaattaattgctgcgatgtagatacttgaatgttacgccagatactggtatggtaggtcaaagaaagtgaattacgacgctataagaagcgcgttagaaaggggcgttgtcccatgagaatggaaaaaatcgacgagaacacaattcgggttctattagaaaatgatgatttagaagaacgcgggattactggacttgatttgttgagcaatcataaaaagattgagcggttcttctattcaattctggaagaagtggacagtgaacacacatttgcgaacaacgatgcagtaacgttccaagtgttgcctaacgatcaagggttagaattactgattagtaagaatatgccaaactttgacggtggtaaaggtcaatcagaaatggtgcaaggcaaagacggtattactgaatacattaaagaacaactgttgaaacgagatacggtccaagatgatgcgactgaggaagaggatgaaatgaccgcttatatgaatcaagcggacaatccaatgaaacagattgtgttatcgtttaagtcatttgacgattggattgctttggcacaacagctacacatcgaaagtggtgtgtcgaacctatttctttacaaacatcagtactatgcacagattattatttttatggagaatacgaccgaagcgtttgcacgggatgatttagcggtcgctaatgaatacgggcagaagtcagaatacacagcagcttttttaagtgaattcggtgaaaaagtcatggataatagtgcgcttgagttaacacgctactacttcaaacattaaaaataacgggttttcctaaatttaggagaacccgttatttttttgcgtattttcggtgggggtgataaataatgaaagttgcacagaccactaacgggtgcttaattcgcgccgatcaagcagccaaacaacagcaagtagcgcggtatttctgtccacattgtcaacaactggttcagttgcatcgtggggtgcataaagcaccatatttcgcacatatcgcagaacgtgtatctggtggtggtgagagtccagcccatctggcgggaaaacaggcgattgctgaattagcacatgcgttgggctggcatgctacctttgaagtacctgtcggcgagacacagcgcgctgatgtatggttaacgcggaatcagcaaccattaattattgaataccaatgcagcccattgacgccagataagttaaaccaacgaacaatcggctatcagcagcgccgattacctgtattatgggtggttggtgaacggtattgttttactaaccattatttaagccagcaacagttggggtttatcaactatcggcggcagtggggcttttatgtggtaagttatttgccaaagtgggggcaatgggtgttatatcaccatattgtcgcccgtgattttgctggttatgcttggcaaaccctgcgattgacaactaaggcgtttgtgcgcttgcttgtagcacaaacaagactgccagccaatcattataagggcaagtcacagcctatgcagcaacaaattattgaccgtcgattagggctgcaagacgcacattatgttgcgttacaggcggattgttatgcccaccatgaacgcttgcaagccgttccggactggtgttactgcacacgtaatgtaccacccatttatcagctcagtcagtttgaaagtcgggtaacgtggtggttgagtgcccaaccaattgatctttttttagcggtaacgcccttactccaacaaccactactaaagcaatccttatttgcacaatgggggcaaatagctttgaaacaagcattaaaaaagaaccgggggtcggttgaccaccggttctaagattaagaaataacatgcaaagcaacccgtgagagggtgcttttttgtttttgaagtgcttggaaagtctgttcaggtgttgtttcagcacaacaggcttgtttcaagagttcataggaatcgcaattttcaatcaataagcctgattcgctttcaccttttgaatagttgaagactactgctgaaggggtcatctgaatgttcatctcacaagataattgttgatctgaatcaaatgcctgtttagtaagtggattgtgccaatcttcaagtaacatttcggtatcaagtcctacgcgtttagcaattgtaaggactaattcgttgttaagttccatatctggttcacggaatgcttgttgcagttgcattaaaaatgattggctcttcttgcccccctggaacgttgctgccttataagcgagtactgcttcataaatggtgctgaaaacgtgattacgtaagtttaaatcatgactattttgttgctgaaactgcatgtaatgctcgacgttttttaagtttaagactggaataaacttaaaatgaatatttgcatcggtttcgccgataatctttaaaagtgcctcttcggaacgtaaacaaagttgcccgattgggttgataaataaaaacacttctaacaagttggttcctccaaactttctatattgtatatactgctcgacgcgcttgtactgtctactctaacaaaattttaaaattatgcaataagttagcttgacaaagtttaagcttgatggataagggcgcgcataattttattgggtggtatttgttcacttaattgatagcgggtgacaaatgatttaaaccaagttgccccttcttggacgttggtgacttcaatttcgacttcataatcctgggtttcgtcagggtattgggtaacatcaagcgttaacaggccagcaactaaagacgcggtctggcggtgcgttgttgcctgtccccagatgaacaattctttgataatcacggcttgtgctgcaaaatagacagcgatctgaccagacgataatacggtttggtgctcaattaagtgagtagcctgctcaagtgttaggcgatcagtgatttcaatcagactatgagcattttctacggttggcacctttagcgtctgttcggcataggtgtcaaagagtcgaatacgcaacccccagtgacgtttagccaatccctggttaggcagttcgaagtaataattagtttgcacaaacggcgctgcaaatggatagtccgcttttagttgcgagaattgcgccgccgttagcatcgtcttaaattcgcgttcaatcgtttgtgacatcggttgagctcctttttaaaaaagcaatgttattatcctagcacaaaaaagcagacttgtaatgaaatttgtatttcagacgattattatttattcaattctaatctatgttaaaatagtgctgtatgtgacagagtgaatgaggggtttataatggtcgaaaattggaagaagtttttaatgccttatgaacaggccgttagcgaattaaaaattaaattacgtgggatgcgcaagcaataccaacaaaataatgaacatgcacccatcgaatttgtaactgggcgcgttaaaccaatcgatagtatcaaagaaaagatgcaacgccgctacattacagaagatttactcgaacaagatatgcaagatatcgctggtttgcggattatgtgtcagtttgtggaagatatccatgaaattgtgggccttttgcaccaacggactgatatgaaaattgttgaagaacgggattacgtttcaaatgttaaaccaagtggttaccggtcatatcatattgtaattgaatatccagtccaactaatcagtggtgaaaaattgattttggccgagattcagattcgaacaatgtcgatgaacttttgggcaaccattgaacattcattaaattataaatatcaaggggaatttcctgaaacgctgaaggcgcggcttaaaagagcggccgaagcatcctttatgttagataaagaaatgtctgaaattcgtgaagaaattcaagaagcacaacaactcttctcatatggaaaatggcaaaacgcacttgaaaaggcaactgaaaatgattctgaaggagagacgccagattgaaagtaacggtatttagcaatgacggtagttcttccgttcaagttgccaatcgcttaacgcaaaaattgatcaatacggggtttgtcattgatgatcaaacgcccgatgtggtcatttcagttggtggagatgggacgcttttatctgcctttcatcggtacacccacgatttagcgcacatccggtttattggcgtgcacacgggacatttagggttttacactgactggcgcgattttgaagtcgatgatctagtcgtcgccttgcaagaagatctcgggcagagtattagctatccgttattagaagttaaaatcgaatatgcggatacgcacgaaatcagtcgcagtttggcgctcaatgaagtgacgttacgtcggtatgcagcgactttgcggacggacgtttacattaaagagaatttttttgaaagttttaggggcgatgggctctgtatttccacaccaactgggtcgacagcttatagtaagtcgattggtggggcggttttacatccacgcttagacgcgatgcagatgaccgaaattgcgtcgattaataatcgcgtatatcgaacactatcggcaccaatcgtgttaccatcggatgaatggttgctcctgaagccttctaagacaagtgattacgttgtgacaattgatcaattcacatttaaggatcgaccaattgcctcgatgcaatttaaaattgcaaaggaaagaatacagtttgcacgttatcgacacaaccatttctggaaccgtgtcgaagatgcatttattgggtcaaaacatgaaatttgaatggcaatatcaagatgcagaaggctgtgtgttgcggaattttttacggcggcataagctttctcgcagtcagttaactaaaattaaatttgcaggtggcacaatcctcgtcaacggccaggaggcacataccaatgcccaactggttcaaaacgatgtggtgactgtttacctcgcaccggaagtggccgtcgaacacgtcatcccagttaaaggggacttgaaagtggtttttgaagacgaccattttttagtggtcgataaaccggcgtttgtggcgtcgttaccggcaccgaaccatccgcacaacacaatggccaatttcgtcaaacaatacttgattgaccaaaatgctgagagccaggcagtgcacgtagtaacgcgcctcgatcgcgatacaagtggtttgatgatgttcaccaagcacggcttcgcgcatagtttgttggataagcaactccaatctaaagaattgcaaaaaacatatgttgcgattgccagtggtgatatgcggttagattatccgcaacatgcgtggatcgatcggccaatcaaacggtcggatgatttttacatgcggcgggtcgttggggttggtggcaaacgctcattaacggaatattggcaagaagcccatggcaccgatgccacgttagttaagttgaagttactaacaggtcggacacatcagattcgggttcattttgcatcactggggcatcccttaattggtgataatttatacggtgtggccgatgatttattaccgcgtcaagcattgcactgtcgcgagttaacgttctatcatccatttgaagaacggtatgtcacggttcaaagcgaactaccagccgattttcaagcagtgatggatcaacgtcatttggcttttcctgcgggcgaattgaataaaatttgattaagctttcaatttgagtcgcaatctaactttagaatgagtatactaataaacgattatggattacggagggattagtattgtgttaactttaaatatgattaagacaatcattttagggattgtcgaaggttttacagaatggctaccaattagttcaaccggccatttagtgttggtcggtagtgttttgaaacttgatgaatcaaaagcattcatcgatatgtttaattatgtgattcaatttggagcgattatggcggttgtgattctatacttccataaattgaatcctttctcaccacgtaagaaccagctcgaacaaaaacaaacgtggacgttatggtttaaggtaattgtggcggtgattccatcagtcattattggattcccattgaatgactggatggatgaacatctgatgaaaaactggattgtggccagcatgttgattttatacggggttttgttcatcgtcatcgaaaatcgcaacaagcataccacaccgaaatttgctgatttaaatacgttaccttggttgacggccttttggattggctgtttccaagccttatcaattattcctgggacatcccgttcaggcgctacgattttaggggcaattattttagggacatcacggtttgtgggtgcggaattctcgttcttcatggcgattccaacgatggtcggcgtggcaatcttgaagattggtaaattcttgtaccaaggcaatacgtttacgggcgatcaatcaatcattttattagtcgggatgttggtttcattcatcgtttcaattatttcaatcaaattcttgatggattacatcaagaaacatgatttcaaggtcttcggttggtaccggattatcttgggcctacttgtcttaggtgcaatgctatttgcataaaggattaaattaaaatttggagggttcatccatgttaatcaaagaagtttgtgttgaaaatttcactaaaattccggcagcaatccgcaatggtgctaaacgaattgagttgaacgacaacttggctgtcggaggcacaacggttagccggggtgtgatggctgaatcagtgcgttatgcgcatgaacacgatgtaccagtgatggtcatgattcgtccgcgtggcggcaactttgtttataacgatcaagaattaaaaattatggaagctgatatcttttcagcgcaagaattaggcgctgacggcatcgtccttggttgcctaacacctgacaatcaaatcgacgaagaagcgatggaaatgttgattggtgctgccaatgggatgcaagttgttttccatatggctttcgatgaaattgcggctgatcaacaagctgcagcaatggaatggctgattgatcatgatgttaaacggattttaacgcatggggggccgttagacgcgcccatcgacgaagcccgtttaaaaacgttaattcaagctgctgatgggcggattgtgattttacctggcggtggcattacagccgacaatgtcgacgcgttaacagaacgtttacaaatttccgaagcacacggtacaaaagtggtcgggacattataagatagtaaaaggcccagtcatcaatgatgactgggcctttttttaatgtttgaataggagataatcgactgacgacgcactctaaacgtgctcacccagtcatctctttccggttagcgacgattgtcaaacgattgctttcagcaatcattcgccagtctaggctaatcctcaagagatacccgactgggatcacactctaaacgtgctctgtaaggcatccgcttccggttaaccctgagccgcaaacgattacgttgtaatcattcacgacgctgtgttaatcctcagcggatattcgccttacgacgcactctaaattttttctatcgctaggacttgtccttggtcggcgttgattgccttgtagtgggttacttggtaattggttggttctaggcgacttaagtcggcgattagatagtcgatttcttcttgagtttcattgaaccgaggatcaacaacgaataccagtaagccaccgcgattaagccgtgagagaatttgatgataggcagagattgtcgtgttaggcaatgtcacgtgttcaaaagaatcaggactgagtgcgcctaagctaaaaatggcggcttgcacttttaactcgggtggtaaggcagtgataatccgctcgtgtccttgattaagcaaagtaacctggtttgcttggtttgcttttgtaagacgatccgcgcaggtttcgatggcttctttttgaatttcgaaaccgtaaacctgaccaaaatcagcaacgcgttctgctaaaaataaggtatcatcgccatgccccacggtggcatcaattacgacatcgccgggccgaattgcctggtctaatagaaaatgtgcaaatttagtgggatgatcaagtatcatgtgttaggactccttcagatgcaataatttaaaatgaataaaacagtaccatgaaccgccgagacacgccgttgctaataaaaagccagctaagacatcactcggataatgaacaagtacgtaaatccgactaaggccgatgcatagtgccaatattaaacaggtgccaatcgctatttttcgccaaacgcgttgacgaattaagtagtaaactaggatgcttaaagttccgaaaaaaagaagtgcccccgaagcatgaccgctagggaagctgtagccgcctgcgtagacaagatggtgaaatgggggccgtggtcgttggacgctcatcttaataaagtggttaagcgttgaaaaaaggaccatgttaatgactaaaaagctagctgctgaccactgtttaaagcccagcaaaccaagcgttacaatggtggtcaaagtcattatactatagggattgccgatcgacgtaatcgcaatgcttacagtatccatcaatggggaggaaagcgaccggatgccagttctgataagggtatcaaaatgtataacccaagtggcatggtgcacaacgctgattaaaatgattagaaaactgattgtgccaagaatgaataaactagccgaaaatcgtttggtcatttttaagaaatcctttcaaaataagctgtaattaaagacaaagaagattattaaatgatacaataattattaagcataagacaactaataaaagtagttgcgtgataggattgttttccccatttattaatattataataaagttcaggtgaagctcaagttaattgtgccacagacaataataatggaaattcggaggcgttagaattgaaagagactagaaaacagcgaattgcagctcaaaaggtaagcttacataagcagaagcgggaaattagaattaagaaagttcgtaatgtgacgacttttgcaggggcaaccgtcttgatgggttcagcaattgcacctagtttttcgaatcgggccaaagcagccactgaagatgtgttaaatagtgcaaacaatgatgaccaagctacaacagctaatacagcaagtagtgcaacatcatcaacaactagttcaagcacaacgacaactgaatcccaatcaacacaacaacctgttgtaaaacctcaattgactgaaaatgaagcgacaaaggtggctacgccacaaccggcaccatctcaagcgcaaccaatttctggagtgcaaagtacgagtgccaatatcgcaaccgctggcgttgttatggcagcagctaattcaagcgcacaaaatttcatcaattcaattgctagttcagctcaacaattagcgggtgataacgatttgtacgcctctgttatgattgcccaagcatcattagaatcaggatttgggagcagtggtttaggttctgcccctaattataacttgtttggggtaaaagggacttacaatggtagttctgtttatatgtggacttgggaagatgatggtcatgggaacatgtatcagatccaagctgcatttagaaaatatccttcatactaccaatcgttacaagattatgtgcatgtgctacggaatacttcatttggtgcaacgccttattatcaaggggcatttaagagccatacaagtagctatcaacaagccacacaatacttacaaggacgttatgcaacagcaaccaattatgcgtcaagtttgaaccgtttgattcaacaatacaatttaacgcaatatgacacgccagggaccaatactggtaacaataatgggggaacaacgactccaaccacgccaacgactccaacgacacctgaaaatgggacaaaatacaccgttagagccggcgattctgtttgggggattgctaatcggtatgggatttcaatgaatgacttgattagctggaataacatcaagaacaatatgattcacccaggccaagtcttgattgtttcaagtagtgcagctggcaacaacaatggtgggacgacaaacccaacagaccctacaacaccaacgaatccaacaacaccagctaatggtgataagtataccgttaaagccggcgactctgtttgggcgattgccaacaaatatgggatttcaatgaacgatttaattagttggaataacatcaagaataatatgattcaccctggcgatgttctaacagtttcaaaaaccgcaactggcaatacaaataacaataattcaaacagcaataacggtaatcagacttcaaacaagacgtatacggttaaatcaggggattctgtctgggcaatttcaaaccgttacggcatctcaatggctgacttggttaaatggaataatatccggaacaactttatctatcctggtcaaaaattagtggttagccaaggtgcaacaactggtaattcaaacaacaataatacaaatagtacaaatccagggcaagcttctgggaagacttatacggttaaggccggcgattctgtctggggaattgctagccgtaacggtatttcgatggcgcaattaatcaaggctaataatattaagaataactttatctacccaggtcaagtcttaaaattaatggctggcgctacaacgccaacgacgcctaacacgaattctgggaagacttatacggttaaatcaggcgatagtctttggtcaatcgcacaaaaaaataataccagtatcgcacaattaaaatcagcgaacaatttacattctgatttaatcttagtcggccaagtcttgaaattgaagtaagagtttggtatgctaagaacaattatttaacgttgagaaggattagtagttatcgttaagcgtttagagagcgtgtggttagtgtgaacacgtcgtttaacataacgaactcgcctttgagttttctattgaactgatagtagatagaaacgtctgccgcgttaaggccagagagttgtccaatatagattggacagaacttaggtggcatcgcggtcaattcgtcctatggtatttataccataggacttttttattggcgttaagtgaattaaaaaagagtgcgtcaaaagtgtccatgcttttgaaagcacgtaaaaaaaaggagtgtttgatatgacttacgatcatcgcgcagttgaacaaaagtggcaagcttactggcaatcacacaaatcgttcaaaacaacagaagataaaaataagaaaaatttctatgcattagatatgttcccatatccgtcaggtcaaggcttacacgttggccatcctgaaggttatacggcaactgatatcttggcccggatgaaacggatgcaaggcttcaacgtgttgcacccaatgggttgggatgcattcggcttacctgctgaacaatatgcgttggatactgggaacaatcctgctgatttcacgcaaaccaatattaatacgttcaaacgccaaatcaattcattaggcttctcatacgattgggatcgtgaagtgaatacaacggatcctgatttctacaaatggacccaatggatttttgaaaaaatgtacgaaaagggcttagcttatgaagctgaagtggctgttaactggagccctgatttagggaccgttgtcgcaaacgaagaagtcattgacggcaaaacagaacgcggtggctatcctgtttaccggaaaccaatgcgtcaatggatgttgaagattacggcttatgctgatcgtttaatcgacgacttagacctagttgattggcctgaaagtgtcaaggatatgcaacgcaactggattggccgctcaaaaggcgctgaagtatcatttgctgttgaaaaccacgacgctcagattgatgtcttcaccacgcgtgccgacacaatgtttggtgtcagctatatcgtgatggccccagaacataaattagtggccgatatcacaacgcctgaacaaaaagcagctgttgatgcttatttaaaagaaatcgaacacaagagtgatcttgaacggactgatttggcgaaagataaaacaggggcctttacaggtgcttacgccattaatccagtcaatggcgaacggttaccaatctggatttcagattacgttctagcctcatacgggactggtgctgtgatggctgtccctgcacatgaccctcgtgattgggaatttgcgaagaaatttggtttaccattgaaaccagttgtggctggtggtaatcctgaagaagctgttcacacagaacctggtgtgatgattaattcagatttccttgatggtttagacaaacaagcagcaatcgacaagatgattgattggttagtagcgcataatgctggtcatgaacaagtgagctacaagttgcgtgactggttattctcacgtcaacgctactggggtgaaccgattccaattattcattgggaagatggcacaacatcagtggtgccagaagctcaattaccacttgaattaccattaacaagtgatatcaagccttcagggactggtgaaagtccacttgcgaacttagcggactggttaaacgtaaccgacgaaaatgggcgcaaaggccgtcgtgaaacgaatacaatgccacaatgggctggtagctcatggtattaccttcgttatatcgatcctaagaaccctgataaattggctgactttgataagttgaaagactggttaccagttgatatgtacatcggtggtgcggaacatgctgtgcttcatttattatatgttcgtttctggcacaagttcttgtatgatatcggggtcgtgccaacgaaggaaccattccaacacctatataaccaaggtatgattttaggcgataaccacgaaaaaatgtcgaaatcaaaagggaacgttgttaaccctgatgatgttgtcgatcgctttggcgctgatacattacgtttatacgaaatgttcatgggcccattagatgcttccatttcatggagtgaaaagggcttagccggcgcgcgtaaattcttggaccgggtatggcgtctatacacagaagaagataccgacgaaaacgaccaactatcaagcaagattgtcgctgaaaatgatgaacaattgaagaagagttacaacgaaactgttaagaaagtgacagaagacttcgaaagcatgcactttaacgtggccatttcacaattgatggtcttcatcaatgatgcttataaagttgacacactaccacgtgaatacgctgaaggcttcgtgaagttattagcgccaattgcaccacacatgatggaagaattatgggcaatgcttggccatgatgactcaatcagttacgtggactggccaacatttgacccagcagcattggtcgctaacgaagtagaagtgatcttccaagttaacggtaagttaaaggccaaagtaacagtagctaaagacacaccgaaggaagaattagaagcgatggctaaggcaaatgaaaaagtagctgaattcattgctgacaagacggtgcgcaaagtgattgccattccaaataaattggtcaatatcgtcgccaattagagtgcgtttcaaaaagagtgggttcaagctcggtcaacttttgagcattatcagagggaagcgaataagcgacgtagtcgattgtttgattcactgggataagcgcagaaagttagcttgaaaagcacgtttcagacaagagtgcgtttggttgcggttagcaactgagcattaataaaaaatttcaaataatccaggttttaggattatttgaaattttagattaagcggaagttgttgcaaccaaaaagcatgtttcaaaaaagcagttactgtttctcgcagtaactgctttttcttatttaaaattaatatttaggggcctaattatccttcaattaatataagggttattctaaagcacttttaagatgataaaaagatgagagcgactattgcttttgggtgttttttattatacgatgataagtaaatttagattctggggttaaccaataatgatgatgctaaaatagaggggtttgaggactatgaaacgaaatttaactgcccgtcagatgcagatgattgcacttggcgggacaattggggttgggctttttatgggggccaacacgacaattaaatggacggggccgtctgtgctgattgcgtatgggattgctggtttattgctgtatctcattatgcgtgcacttggagaaatgctgtatgttgatccagatacggggtcctttgccaagtttgcaacggaatatatgcatccgatttttggttacttaacagcgtggagcaacgtcttccaattcgttgtcgtggggatgagtgaaatgattgccatcggcggttacttagaattctggtggccgaacttgccgggctgggtaccgggactggtcgcgattacgttcttatgtgcggctaacttaatttcagtcagcatgtttggtgaattggaattttggtttgcgctgattaaagtcgtcacgattattctgatgattgtggcaggcctgggtctcattgtttttgggattgggaaccatatgcatccagtcggcatcagtaatttatggacgcacggcttctttacggggggctttaaaggcttcatctttgccttggcaattgtcttggcatcataccaagggattgaattgattgggattacggctggcgaggctgaaaatccacaatcaacattggtcaaagcaattcaatcaacggttgcacggattttgattttctatattggggcgattttcgtgatcttgagtatttatccttggaacgaattgagtcaggtcgggtcaccgtttgtgcaaacctttgctaaaattgggattaccgctgcagcatcaatcattaacttcgtagtgattacagcagccttatcgggtgctaactcagggatttacagtgccagtcgaatgacgtttacgttggccaataatgggcagttaccaaaacgattcttaaaattaaaccgccacggtgtcccattttatgcggtcggtgcgatttcattagggattttaattggggtgattttaaacgccattttaccactcgtttatcctaaagccggcaatgtcttcgtgctcgtgtatagctcaagtgtcttaccagggatggtgccatggttcgtcattttaatcagccaaattgcctttagaaagcaacacgctgacaagatggcacaacatccatttaagatgccttggtcaccttattcgaactacattacattggcgatgctagccatcaccttaatcttcatgttcattaatccggaaacgcggatttcaatcattgttggtttaattttcttaatgatcatggtggttatttatttcgtgaaatttggtcggcaaaaatcatgacaagcaaaaaggcagcctagttggctgcctttttttattcgattggattgattcacccgctgtttggcggcgatcaatgttatcttcgccccataaacagaggagatttaagattttattgagtgactgaccgtattcagagaggctgtattcaacgcggggcggaatttcttgataaattttacgattgatgatgccatcgttttcgagttcgcgtaattgtgcagtgagcaccttttgggaaatctttgggatgcgttgtaagagctcgcttgatcgccgtggttggttgcgcaaatgacaaagaataacgggtttccatttaccgccgataatttccatcgtagcttcaacgccaatgttatatgttttctcattcatttctaattttgattcaccttttcattgtgataagactcaattattacttttcagtaacctactgactaaaaagtgcgtgattgtgaaaatcacgctcctattgaataatatagtacatcagtaaaaaaagtctaataggagtgtggcagtatgagtagtaaacaacgggcgaacctcacattactagcattggcaatcagtgcttttgcgattggttcgacagaattcatcagtgtcggcttaatgccattgatgattaaggattttgggattacgatgagtcaagcaggactaaccgtatcgatgtatgctttgggaattacgattggggcaccgattttggcgattttaacaagtcgttggccacggaaaaatttattgttggggattatggttgtctttatcattggtaacttgacggtcgcttttgcgccagtcttcgcctgtaacgccgattttagaatcaaaaatgggttggtcaccaagggccgttgtgatcatcttaattatttatggtctgatggtggcttttggaaatacgttgggtggcaaatggtcaaatcaccaaccgttgatggcgctattgaaaatgtttgttggcttgttagtgaccttgttgctattcaggttaacgttaaatgcccattggttcggtttaattaacgttttattgatgggctttttcgccttcatgaacgttccagggctccaattatacattgtgcagttggctgaaaaaatcaggccaaatgatattccattggcttcggctttgaatatctcagcctttaatatcgggattacgataggctcattagttggcgggcaagcatcggcagcttggggcttagacagtacaccaatctttggcggtatcatggtttttgtcagcattctgttgacgtggtatttgattcaacaaagtaaacaagctaaataatgagatggcagagagctccgcgaaggcggggctctttttttgaaacgtgctattggcgctagatttctgcgcctaactacaaaacgggaatcatggccgagtacgccataattcccgtttttagtttagtgctcaaaatctgggcaagcgctaatagcactcttattgaaacgtgcttctgatgacaacaacttccgcttaatctaaaattcccaataatcttaaaacctggattattgggaattttgtattaatgctcagttgctaaccgtcatcagaagcactctttttcataaagttttgttaaaggaattgcaaggcttggggcaatcctctaaaatggtaggaagatgctttttgacgtttaataagggagttatgggaaatgaccaattcacctgaaacaaaggcgacggatagatcttcacaaagtaagatgttacggggctccgcttggatgaccgctgggagtattttctcgcgaattctgggcgccgtctatgtaattccgtggccaatctggtttggcgcgaatttcttacaagccaacacattatttgcaaaaggataccaaatttatagtgtctttttagtgatctcgacggctgggattccaggggcgctatcgaaacaaattgcacgctataacgaaatgaatgagtatggcattggtcagcgtcttttcagaaagtcgctgattttaatgttggcaatgggtgttttatcagcgctcgcactctttgcgttagcgcccgttctagcagcgggtgatccgcggatggtaccggtcttccggtcattaagctggccgctattgattattccattgctcagtattatgcggggctttttccaaggctatgccgaaatggcgccgtctgcgatttcgcaatttattgaacaagcagcccgcgtgctgtacatgaccgtgaccgcttttatgattatgcaagtgtttaaaggcagctacgtggatgctgtgacgcaggcgacatttgccgcattcattggggctgctgccggcttgttattactgattttctattatttgaaacaacgcggtcgcatttcagagttagtggccaatagtaacaacgaattagaagtgtcaacgactgacttgttaaaagggattgtgcgccaatcaattccattcatcgtaatcgacgcaagtgtcaacttggtctatatcatcgaccaatacacgtttaatccgatgatgcatgatttcgtggttgccagtgatcatcagttgtataacttgtatgctttatttgcagctaatgcgaataaactgatttcaatcaccgtttcactcgctgctgccatggcggtcacggcgattccattgatgtcagctgcgcatgtgcggggcaatcaaaaagaattgcaacatcaaatcggcagtactttgcaattattcaacttagtgatgattccagcggcatttgggatggcggcggttgccggtccgctttacacgttattctacgcgcatgatacgcttgggattagtgtcttacaattttcatcttacatttctattatgctcggcctctttacggttttaggcgctgtcttacaaggcctctatcagaaccgcttggcattgttttacttattcatcggattcatcgtcaaaattgtggcgcagtacccagcgatttattttttccgtgtctatggcccgctagtatcgaccggcttagcctttgcgacaagttcggttttaatgattgcagcactgcatcgctattatcactttgcattacgcaaaaccattcggcgcttaatcggcgttttaggcttctcattggtgatgtatttggtaacggcgggggcagtcaaggggttataccttgtctttaacccgtacagccgtcttcagagcgttctagtcttaatgattagcgttggcctaggtgtggctgtttacgccgcattggtgcttaaatcgcgcttagcggactatgtcattgggagtaacttggatcggtttagaagaaagttgagaatcaaatgagaattgatcgctttttaagtcatatgaatgtggcttcacgcaaagaattaaaggtactttttaaagcgggacgcgtgcgcgttgatgggactgtggtcaaagatgcgaagttcaaagtgaacgaggcgaccgttgtctatgttgacgacgaacccgtgcgttatcaaacctatttttattggctgatgaacaaaccggcgggtgtgatttcggcgacgactgatccccagaaaacagtgcttgatttattggcaccagcggacttgcgggatgatctgtttccagtggggcgattggataaagacacgactggtttattgttgttgacgaacgatggcgatttaagccatgccttgttgagtcctaaaaaacatgtcagtaaagtttatcgtgccacgattgccgggattgtcacggcagaggatcaagcgcggtttgaagcggggctcgtgttgagtgattttactgcacaaccagcacagcttgaaattctgagtgttgatgaggcgcaacaagaaagtcagattaccgttgagattcatgaaggtaaattccatcaagtgaagcggatgtttcatgcggtcggcaaggaagtcttgacgctagaacggcttaagatgggaccactggcattgccagatgatttagaccgtggccaataccgtgcgttgacagatgcagaacttgcattacttaaagcgaattaataaacagcagccctttcaaaaggactgctgtttttttaagattgatgaatcattttagccatatagtgtggtaaggtctgaatcacttggctaggaagtgtgacgtattgggttttggcgagttcatcagcaatcgcactgtgggtataaacagcggcacaaatcgtctgatagtgggtgccaaattgaccacagaatgcggcaataataccagtcagtgtatcgccgctaccgccagttgccatggaaggcccaccgatggttagttgctgaacctgttgctgatgatagacctcagtgtgatgttttttaagcactaaagtcgcgtttggataagcagcgagtgcggcttgattagcagcaaccgtttgctgctcgattgcaacaccgctgaggcgcgcccattccatttgatgcggggttaaaatgagttgcgtattcgggatcgtcagtttttcatgtgcgatgattgatagtgctgaaccatcgataatcagtgtttgtgttggttggatggtttgtaagatttttctcagcagttcaacggcaaacgaagtaatgccaagaccaggtccgacaacaacgacatcagcagcctggactgcagacgaccactgcacgaagggttgttgataatcaatgaacatggcttctggtaagcgcgcgtgcagtccgctgagaacacttaagtcactagcaacggaaactaatccagcaccagcataaacagccgcacaggcactcataatcgcagcaccgccgtattgctgactaccaccaatgattaagacgcggccaaaatcgcctttatgactgatggcaggccgtgcctgcaggaccgcacgaacggttgaatttgtgatgacttgcatctgaatccctcccttatcaactattattataagcgaaatattaataaatgggtattggcagggctctgtaacactggtacaatagtcttgtagcacaatcgcccgtgtggcggaattggcagacgcgcagcgttcaggtcgctgtttgggtaaccaagtacaggttcgaatcctgccacgggcattatggattaaaaaaggatcgctatcactttagatagcggtctttttttgttcaaaaagtacatcgattattgattatttacctcattatgactggtttagccaatggattagcgacaattattagcactattcaaaaaaagttgcatcaattttaaggaattaaaccattagtagaaaacgatagctttaaataaatattttcttatcaatataattattatttgaactataaaaacggctgaaagctacaagctgtaaactgcatcgcgattaaaaggtcatttaataaataaaaacatcacaaacttggcgaatttcaataaaaaaatattaatagggttaaaacttattaaaaatatttttttgtcaataccgttaatttcagctatttacatttaattaatttatataataggtagattgtaaaattaatccgaacgctgttcggacaaaaaagatcagcttcctttaaaatggtgtttaccacaaacccatcttttaggagctgatcttttgtctagtataacctattccgaacgaattaaaatcgaaaccttttgtgaactagggctgtccaatatccaaatgggcgttcggctgaaccgatcaccgtcaacaatttcttatgaattatctcgatgtcaaccttatcaggctgaattagcacaaacagatgccgaatacaagcgatcacgatgtggtcggaaaactaagctgagcgatgagttaaagcaaaaaattctcaaccatttacgtctaagctggtcaccaggaatgattgctcacgaatttaaactagctactaaatctatttataattggctaaatcaggggagaattggtttctccttgaatgatctacctgaacatggcgtacgccaacggcgtaacgttgaccaacgatccaaatataatcaatctttggggcgatcaattgaacagcgtcccatgatgattaataaacgtaagcgcatcggcgattttgaactagatacagtcgttggtcctcgtgggcatagtaaggcagttttattaactttaatcgatcgcaaatcacggttcctttgggcataccggttaaaagatcggacgacagcgactgttaatgaagcactaactaagttcctaaccacttttaatggtccggtgcacagctttactgtggaccgtggcactgagtttagtgggctagtatcacttgaatcacaatatggtattaagacctattactgccatgcttatactccagctgaacgtggtagtaatgaacgctttaatcggaatttacgttatttttatcctaaagggactcgttttgagcacattagtgctcaagatttaacgacgacgttactccaaattaaccagcgaccgcttaaaatactcgactggcaaacaccgtatcaggttatgctgacaaatttgtccaaaaattcggattaaatttgcaatctaccaatataatgcctgtggagcagagcaggattactagttcgcatattgtaggtcctcaaaatagatagaaggagtaatgcttattatgaataatcaattattaatgctcattaaatatcgtaatattttggatcaattatttgtcacagttttgcaaaatgttgacttatcactcgaacaatatttgttgatggaaaaaatggatcgtgaaaaagaagaaacgcccggcaaccttgctgcttgtatgggcgtttctcgaccagctatttcccgccaatgccaatcgttgggtgaaaaaggattaattgaacgggctaatgtggggagttttattggtgatagtcgtaaagtatactatcgacttacaaccaaggggaaacagttattattaaagattagactaaacagtaatgacatgattgatagtttggattctggatttgttactaccaattgggatgaaattgataaccaaattgcgctaatgtccgacgcggttaaaagaacattcaatatcaatgagattcaaatcttttagagagactatcggaatctgaacgggggagttatttagtttagcgcgtgttaatgggcaggatcgaagcgatggatgtcgagtatgattatttttgaatgtaaccggttgcgatgaattggcataaacggtatattattaaggtatctaagggataggagagaactaagcatgacaattaaattaatcgcatccgatatggatcataccttattaactgagagtggccagttgccaccaaactttataccaaccattcagcaattacatgctaaaggggttcaattcgcagctgccagcggtcgaccaatgtacacgttaaagcaaatgtttcccgaacttgctgacacaatggtttacgtcagcgataacgggggtgcaattggttatcaaggtgaaactttattcaaaagtttattgccgttagctgattaccaacggatggtccaattcgttaatcaaacgccagatgggattggcgtgatttgtgggatggacgcggcgtacgttgaaacacaatatcgagattatgacgcgactttgcggcaattctatgccaacattgaatatgtacctgatttaacgcaggttagtgttgaagccaacaagtttacgatttatttcccggaaaaagatagtcaagcacagtatgaagctgttttcgcacccgaatttgaaccggcttattcagtaacggttgctggtgttgaatggatcgatattatgaatcaaggcatcgacaaaggccatgcaatgcgctttttggcggattatttcaacatcacgccggcgcaaatgatggccttcggggatacttataatgataaagaaatgctgcaaaccgttgaacatagttatttgatggggaatgctgccgacgatatgatccaatatgcgacttatcgtgccgacactaatgagaactatggtgtgttaaaggagatccagaaattactttagtcaaccaatcgtagatgaattggtaatgctgggtagcatctgtttctaataaaatttcatgcgctgtatgaggtagaatgcgcaccgttgcgttgttaacggtgcgctttttgaattggttcgttaaatgccgcgcgcggcgaccataaccgccagctggatcgtcggcgccactcattacgagaactgggcgggattgtaaggcaagttgccaatcagcatgccgagttaactcagtgagggtgaagagcattgcaaaaccgctatttgaaaagacgtagccacacaatggatgctgttcgtaggccgccacgtttgcttgattgtaacttaaccatgaaaaaggtcggtgagcatcaaatcgtttaggatagaccccaaacgccaagttattccagacagtaccggggcgcttagctgcaatggcgccgattaatttaacgattggtaaggcggatttaagaatgaagggtacatcgataacgcccatgaagatggctcaagtaatcggcacttcagtttgcttaacatattgtgtcgctagcattgagcccattgagtgtccgagcacaaataatggtagctctgggtattcctcgtggacaatgcgaccgattaaggtacaatcgttgactagcgtctggagcccgtttggcccgaaataaccgagctcatcgttggactgaacggagtggccttgcccaatatgatcgtgtccgatgacgataatcccacgatctgctaagaattgagcgaaagcatcataacgttcgatatattcggccatcccagttagaatttggacaactgcgaccggtttttggattggaaaccaagtcacgacatttaaagtatggattcgatcagtagattgaacggtcaatttttgcattggttagcgcctcccgaaaaagataacgtactttacgattcattttagcagaaacaatctagagataccaaaaggacgccaaacaactttaaccgttgtttggcgtcctttttagtcatgcttaaagttgcacatcatcgttaattcgtgttgcgcgtgagaagtatttcgaatagaagcgactgataattccccaatagtaaaagatgagggctaatgcgctaattaagacgaaatcgagtgggtaaggaatcaggttaattccgttgaattcccgactgcccaagaatgaaatcagcgaaagcaatgcgagatagataattaaccataagcttcctttgaattgggcccaagtattttcccagtgaatccgatactcatagtagaaataaaatggtaagccaagcataatgacgccaatcaccttaatggttgttggccacattgcccagtaagttgctaaactggcaaggataaaggataatggcgacatgattttcatccaaggtgactgaacagggcggttcatatcaggggccattttacgtaatgacatgacggtgaccgggccggttaaataggcaatcaacgttgcggttgaaatcacgctggctaacgttccccaacttctaaaaattgaaacgagtagcatgctgacgatggcgttaatgaccatcgcaatgcgaggaatattatattgttcgttcatgcggccgacaatcggtggcatgtgtttgttctgctttaatgctgctaatgtccgtgcacatgaagcgacaaaggaaacgccggttccaaagggtgaaacaaacgcatctaagtaaagtaagacggctaaccaatggattccaagtaaaatggctaagtcggcaaagggtgattggaagtttaaaccgtgccaaccgactttggcgagcaaggcgggtgaaacagaaccgataaaggtaatttgcaagagtagataaatcacaatactgatcccaagtgaaattgcaattccacgtccaatattccgtttagaatcacggatttcactgccgacattgattactgtttgaaaggcattgtatgaaaagataatcccagaaatcgaagtggctgcaaaaattttggcggaaccatagggcataaacgtcgccattgaatgcccgaagttgccagtatggaaaccagttgagactaacataataatggttaataatggcacacctaatttaaagattgcaatgaagctggtaaaacgggtcaagaatttaacggaccagaaatttaaaagggtgaagacgatgataaaggcaaagacgacgagcaagccacgattcgaaatttcagcgtggtgcataaagtgattcgtccagttagcccacgcccatggccaagaactcatatactggacagcagcgacggcttcgattgggataatcgtgactaatgatacccaattggcccacgctgcgatgaagccgagtaatgaaccgtgactatattgggcatagtgactcatcccgccactttcaggaaacatcgtcccgagttcaacgtaattaaaggcaattgcaccaatcacaattgcgccaacaatccaagagatgatggctgctgggcctgccacggtcgttgcctcccatgcaccaaacagccaaccggaaccgatgatggaacttaaaccgagcatcactaggctaaataaactcattttgttcttctctatcataaagacctcctgtgtatggtgtgccattatagcaaccatcaccgttggtttcaaattaaaaatacggctaaaatgagtcgtgaagtctatcaaattaacaatggtaacgccttctgaattaattattaacaattaaaaaaaccgtcacaaaaagtgacggttgaatagttaatttaagtcaattgccccgttgaatggcatccgtttgtttaaaaagatttaatttacgatcgttccagaatgtttcagacatatcgcgatagaagatcgcagtctgacagcctgggcaacgtttgataccatattcaattggcgcctgacatgcagggcaatgaaatgcggttgattcaggaattgtattttgcgaatcggccattaaaaggactccaatcaagttgttatcaatagtataccgcatacatacgctatttgttaagcgtttaaacctttttttttcaaaaaatatgcacaaatcggaaataatatgctatactatatcaagtaatgcgagtgtagtttagtggtaaaactcaagcttcccaagcttgcgtcgcgggtccgattcccgtcactcgcttaaagattcatgcaaaagaggttgcaacagaagaaattttgttgcaacctcttttttattctctgaaatttaatcctcggcggatacccgacttacatcacactcttttcgttatcagacctaaggccgattgtttgtttaaaggcgctctgataaagtatatttattatctatcgactaaaaactcgtgacacttacgagcaatctaagtagtgggagcgtacgacattgacattattagagattaaagatattcacaagtcctattatatgaacaaggctgaatttaaagtcttaaaaggcatcaatttaagctttgaccgtggcgaatttgtttcaatcctcggggaatcaggcggcggtaaatcgacgttgctgaacatcatcggtgggttagatcaccaatacgatggggagctcatcgttgatgggacatctttaaagaatgcatccgaaaagaaatttgatgcttatcggagtcaaacgattggctttattttccagagctttaatttaattagtcatttgactaacttggaaaatgtgatggtgccacttgaaatgactgatctatcacataaggaacgggttgccaaagcgaccgccttattggaacaagttggcttgaaggaacatatccataaacatcccaaccaattgtcaggtggacaaaagcaacgggttgctattgccagagccttggctgctgatccagatgtcatcattgccgatgaaccaacgggtgcgttagatagccagaatacggccgagattctcgaaatcttacaaaagattgccgaagatggcaaactcgtcatcgccgtaacccattcacaagccgttgctgaccacggaacacgggttgtccacatggttgatgggcagattgattatgacaagcaattaaaaccagcttacccagctccaactggtccggtaattaagaagagtagtccattaagttttatgtctgctttcaaaatggcaatgcaacacatgcgctacgatattaaacggaatttgctcattatttttggcgcgtccattgggattttctccgtcattttaatgctaggcttgggtcaaggggtgactggctatattaatgatcagatttcatcgcaagttaatccaaatacgattcagattgcaagaaacctcacgcgcaaacagattgaagccggtgaacaaggtaacttagctgataaggatatcaaccgccttaataaggtcaaaaacgtgacgaaggttgaaaagggctactacatgaatggtgtccaagtgcactatcaaaagaagagtgaaacagtccaaatgttccaaacgtttaataaaaccgaacgtgtccaagatattaagaccgggactaaacctggggccaacgaaattattttaacgaaggcaatggctaagaagttagataaaaattacaagaagatggttggtcggacagtaaccacttacgtcaatgccattagtaaggatcaacgtccagttcaaatgcgccaagatgtgaaagtttcagggatcatcaattctgggactgaagccgtcacatatggcacattagccaagatgtaccaagcgcaaggattagagtttgcacccaactttgcagcagtcacggttaataagacccaaaatgttaaagccgttcaaaataaaatcaaaacctacactagcaaagtcaacggtaagacacaaaaggattaccaaatcacaggggttggtgcgatcctcgattcaattaacacttacttgatgttagccttctacgtcttagctgggattgccgggatttcattattggtttcagcaatcatgattatcgtggtgctctacatcagtgtgtcagaacggacgaaggaaatcgggattctacgcgcaatcggcgcccgaaagaaagatattcggcacttattcgtctcagaagccttcttgattgggttattatcaagtgttcttggtgccggcattgctggccttggacaattgcttgtcaatacgttggcccaaccattaacgcatatgccaattgtggcaattaccagtggctacgtcctattcgggataatcatcagcattatcatcagtctcttagcggcactagcaccttctcgtaaggcagctaagttagatccaattgaagccctcgcggcagaataattgcgcttgaaaagtgcagctaagttctatatactagttatcaagttcgaacagtcaaaagaatagcatcaacagcgatttatagcgagctcacagacggtgtaaggtgggtaatcaagttgacgcggcgcgcttttggttgaacaattgcatactattgagtggatcgattgatcaatcagagtggtaccgcgggaattctcgtctctttcatttatttggaagggacttttttttgttcacaaatattaggaggctatcaacatggattttaaacaacaagtcaccactgccttaatgggcgttttaggggacagtttaccagcagataaagtagcacaactcattgaaacaccaaaaacatcagacttaggggactatgcttttccaacgtttatcttagcgaaaacattacggaaagcaccccaacaaatcgcccaagacttagtcgcagaaatggatcaagccggctttgaaaaagtgattgccaacgggccatacatcaacttcttcttggataaggctacgtttagcgaccaaatcctcaaaaccgtcttaacgcaagccgctaattacggccaaagtgacctcggtaaagggggcaacgtgccaatcgacatgtcatcacccaacatcgctaaacccatctcaatgggccatttacggtcaacagtgattgggaactcaatcgccaagattttgacaaaagtgggcttcaacccaattaaaatcaatcacttgggtgactggggtactcaattcggtaaattaatcgtagcttataaaaaatgggggagtgaagaagaagttaaagaagacccaatcacgaaccttttgaaatattacgttaagttccatcaagaagacgttgaacatccagaattagacgatgaagcacgggcatggttccgtaagcttgaagccggggatgaagaagcaacgaagttatggtcatggtttagaactgaatcattaaaggaattccaaaagatctatacgatgttaggggtcgaattcgactcatttaatggtgaagccttctataacgacaagatggacggtgtggtcaacgcacttgaagcaaaagggctcttacaagaaagtcgcggtgctgaaatcgtcgacttaacagcttacaacttgaacccagccttgattaaaaaatcagacggcgcaacactctacatgacacgtgatttagccgctgcgatgtatcggcatgacacatacgacttcgtgcaatcattgtacgttgttggtggcgaacaacgggaacatttcaaccaaatgaaggccgttttaaaagaaatgggcaacgattggtcggacgaaattcaccatattccattcggcttaattactcaaggtggtaagaaattatcaacgcgtagcggtcgtgtgatcttattggaagaagttttaaatgacgccgttaacctagcacaacaacaaattgaaaccaaaaaccctgatttaccaaacaaagaagaagttgcaaaacaagtcggcatcggtgcggttattttccatgatttgaagaatgatcgtttagataattttgactttgacttagaagaagttgtgcgtttcgaaggtgagacaggtccatacgtgcaatacacaaatgcccgtgcccaaagtatcttgcgcaaggccaaccaagaagtcgcaatggacgctgacttagtcgtttcagatgccaacgcttgggatgtcttgaagatgctcggcaacttcccagatgtgattgtcaaagccagccaagaatacgaaccatcagtgattgccaaatacgcattacgcttggcaaaagccttcaacaagtattacgcaaactcaaaaattttggcagacgacgatcaaaaaaatgcgcgtctttcattagtgaagagtgtcagcacagtcctagaagcctcactagacttattaggcgtacaagcaccaaaagcaatgtagagtgcgtttaaagcggtttgactctgagcatttgcctaatatcgtgaataagcgacgcagtcgattgtttgcgatatgtagcaaagcacaagagtcagctttaaaaagcatgtttaaaaacagagtgcctttgaaacggtttgaccttgaggattaacaaaaaaatagcgattatggcgggttttagccataaccgctatttttaggttaaccggaaaggtcagtttcaaaaagcacgtttcagatcagagtgtgcaagcaggcggttatatttgagcattaactggatttggcgaattgacgatgtcatcgtcgatttgataaatttggttaagcgcaggaatatgcctggagcacatttaagccacccgattaaatcaatctggtggcttttttatttttcgaaaaattctaattcgatgacaaccccgccaacttccgttatagtaatcttgaaatagtgggggagggttcactaatggtattagtcttaaaacgccagattaaagggattccggttttggaagtggtcgctgacgaacaacgtcatcagccattaccactcgtgatttactatcatggctggcggtcagcaaaagaattggttttaacgcaagcgcgtaaactggctgaagctgggatgcgcgtggtattaccggatgcactgaatcatggtgaacggctgcaacctgtttcagagattccgtcatggactttttggcaaagtattcaaaccaaccttgccgaattcagtttgattgttgattactggcaccaacttaatttaattcaagctgaccgcatcggcgtcgggggtgtttccatgggtgggatgacaacggcggcactcttaaccaagcatccagaaattaaagtggcggcttgtatcatgggctcgccggcaccgctagcctatgcgcgcttagttcgtgaaaatatccgtgcgcatcagttagcacaacctgacgatctagggttattgacaagttggttaacggcctacgatttaactgaacagccgcaggcaattgctcaacggcctgttttattctggcatgggacagcagatgaacgaattccctatgaacaagtagcagcttttgaacagcagattaaaggtcaaacttatgccaaaaacgtgacatttttaacagcaaatggtgaacgccatctggtgaagccagcgctgatgaacataattacagatttttttagtacgcaactataaaataaatcatttttaaaaagccaacgttaaattcttagctgcgataatccctttatggttgtcagatgaaatacaataattcatctgacgactatggagggatttttgtatgcccagatctaaacatacggtactcgagaaattaacaatcttagatgaactgacccaatcaaaaattggactgggtccggtggccaatcgccatggcattaatcataagacgctagagcgttggcgagatcgatactcccgtgatggaattaatggtctaaaggaggctaagaaaaacaaacactattcgaaggaactcaagctcaaagtagtccacgcatatcttataggcgaaggcacctttgatgaacttgcaaataagtttggacttcgtggatcgcagcaagtcgtagactgggtaaacaagtataatgggaataaacctttgacggcgtcgccgtccagaaagcaggttcccactatgagccgtaaaacaaccttggaagaacgcattgaaattgtcgagtatgtcaccaagctgaatcattcatacacagaggccgctgaacgcttccaagtctcttatcaacaagcacgttcatgggtaatcaaggccaatcacggcggctatgaggcgctcgtggacaaccgtggccatcacaaagaacaagctgagctgactgaactcgataaagccaatcttgaaatcaggcagctcaaagcacagctcgcagacaaagagcttgtggaggcattcgcaaaaaaattgctggaaatccagcgcagggggtgagtaaacaacatcgactgtcttacttcgcaattaatgaggtcagtcaaggcaagcgtggtgcaatatctacgctgttggccgttgtcggtgtaagccggcaggcttactacaaagggttaaatcgagaagaaacagcttgggaagcccgtaatcgtcagctcaaggaacggacacaatactggtttgattttcatcatcaaggtatcggtgctgggaaccttttattgaatcttcaacatgatgacctaattgacttccccgttactttcaggatggtacgtcgtgtgatgcgggagctcagcttgacatgtcaaattcgggtcaagaagcacagtcgacataaggagaacgaacagcacattcaagacaatgtgctcaatcagaacttcgacgtcgacagtcctaatcaggtctggttgtccgattcaacggaactgacttacggcgtaaataataagtataaggtgcgcttgagtggcgtccttgatctctacggccgacgtttgttgtcctacaatttgagcactactgaaacgtcagcagcagaaatcgaggttttccaacgagcctttgaggcttctggcgacgtccacccattggttcacactgatcgaggatcagcctacacctctggtgccttcaacaactttcttggtcgttacaacgtcacacgtagcatgtctcgaccaggaacaccatacgacaacgcaccgatggagcgctggtggaacgaattcaagttacggtggatggctcgccatccactagcaaagacttgcgaagagcttgtaagactggttgaggaaggaatcgaatatttcaatcaccacaaccgctcagcacaaagaaacggcctcaccccagatgaatactggagtgaagccgcatagagacagattcaactttatattatttcatttgtcaacttgacagggcctagtgcaagcgttggcctttttgacgtgttttatttcttggaatattaaaaaaataatgatttataatgggaattaaaatacgaatttagacgactttttcattggtttggtatagcgggaagaatgctttttattatttgtataatacgtgttgtatgcttatcggtctaattgtttatcgcagtaatatggattttgtgtgtcgataatatttatggaaaccattatcgttttattatagtcggagttggtgaagcgtgttaagttaaatgtgttccaaaaataattttttaggagatgagactatcaaaaaagtagtaggtattttagcgttcggcattttaacgaccagttgcatgagtgttttacaagaagcaagggctacgaccagttctaattaccaaagtaagcaaagtgaggtgcttgatgatagcctccaacctaaggtgaggcaccagaagggtgtaacacgttcagaaaaggcgccatattcaaaactgtatattggccgcggtgatgttaataaagaattggctcggcaacaaagggccttgagttattcaagcttagagccttccggattatacgccaaaaaaggggacgtgctgacggtgagcaaaacgggtcaagacttgatgtcgctgacgattggctcgcctgagcgagatgttcagaaacgatatccgctcgtaaatggggtgacgactattacagttgaaaatgatggccctatttatgtgacgaatccaaatgattcaggcggtactagggtgtcaatctttgatgccactggtgaaatgccgttctttgatgcaaacaagacgagtgtcgaagattttaagaaacaaatgactgaaatgacagacgcaaaagatgttcaacttgttagtgatcgtgctttaattactgtgagttatgagatggaaaagaaatatttgggggatcccaaagcgttaatggctaattatgaccgattcctggtcgctcaagatcgagtttcagggatcagtaatgaaggtcggccggttaacttttcagatcgccatttacaacatttcttagaatcgccatcgtattatatgtatgcgacaaacgaatacatgggttttaaaggcgatgcagctatgaaaagtttattagaacttcaggatccttgggaatctggcatggaagtggtcatcagagacaacaaaaaccatggacatggagagaagttgtcgaatcgagtgttaatatttattcgttagcagcgcaaaaagaaatgacgggtgcgatgcctgatttagataagtattatccagaaatgcacgcctatctaaattctgatcataaaaacttcaatcaacaaggggactttgtcaaaatgacaatgtttgcccaactagcaaacacctttggcgatgatttctacccgatcttacatcagtattatcgcgaaaatcagttagcctatgattcaaatgaagatcgaatgcagcattttttgttacatgtctctgaagtaacgggctataatatgctcccttattatgaacaatggggatttaaagtttctgaagaagtacagaagaaaatcagcaactacacaacgttgtctgacccaatttggttaaatgacaatcaaactaaaaaacaattgccaatgagcttaatgaaggctgtgtcgctcagtaaacaagggattaaagttgacttaacaaactatcaaattaatatctttaaggatcagaaattaattgttaagaaaaatggcaaggtgatcgcggagttggctgataagaaaccagctaatgggacagttattaatgatatttggcagattgatgaaccacttgatgtaaccgatatgattatcattgaacaacaaaatgccaatgggacttataatcggtttaatcaatcgatcagtgggacttcgcttagggaacaattggaaaactatttaaacacaacaaaaccaatcgagacgattctaacgcaagataaattaaacaatctacgccaacaggttgatgcactacaacctaatactgataaagaagaattaatggagatggttaaaaagctccaacaaagatatttagacgtattagttggtgaaattgaactgaattcagaatcagaacttgtggtgacatttgctgatggaaaacttaaggaatatgacgatttaaaagttcaagcagatacacatacgattgctcaagtaacgaatggtaagccgaatgttggtcgtgttgaaggaaatcaattgattattccaaaccaaaaagatgccactgcgatctcgatagcggtgactttaccgcatggtacttatctagtgaaagtgattagtcaagaggtgcttgttgctagaaagttagtatcggatttatttgaacaggacggtaagttgaaaccaaatgtgacgcaaaaagtgttagatcgagcatggcagcaagtaaatcagttaccacaagacagcaaagaagcgctagcgaaaaaaatgaaggaggcacaacagttattcttgaatgcgcttattgcggatgtaacgcttaaagatgccaaaatgatggtgacttttgcaaatgacctatttaaaaaatatacgattcttgtcatggaagaagaccacagcatagggacaatagtgtttggccaggcctttgagggagaattaagcggcaatgtctttacaccaatgcgtttaacagtttcgggtaaaacgtatcgggtaaacgttatgcacaatagcggtacctatcaagttaaaacgttggtagctgattgatgggttatagcgaaaccagataaactaatctaaaggcttttttatgaaattaaattgaaatacaaaattgatatccatcaataaaggctgagcaatagtgctcgcctttttatttggtttcaacatttgataatccccatttccgtggtagtctgtatataaagcattatcagatggaggttaggcaaacgtgggaaatggacgacttagacgtgctagtcagtttaataagacacggtttcgctttgtgggcaaagggttattagttggggcgttcactggattggtggtcagtttatttcgcttagcgattgaaaaaggactggcctttgttatcactatctatcaagggttaaatgcacacccgtggtattgggtgccattggttggtgccaatttattgatcggcctgcttgtggcacaattattaaaaaaggaaccgaatataagtggttcggggattccacaagttgaaggacaattggaaggtgagtttgatttcaattggtggtcaatcctgtggcgtaaatttgttgggggcattttaagtattgcacctggcttattcttgggacgagaaggcccatcgattcagctgggggctgccgttggacagggggtcgccgctaagttggtaaatcgcggtgctgatcgtcggattttaatcgctagtggggctgccgcgggcttatcggctgcgtttaatgcaccaattgccgggacctttttcgtactagaagaaatctaccataacttttcaccgttagtttgggtgacgtcgcttgctagcgcaattgcagcgaacttcatttcattaaatttttttggtttgacaccgacattacatattacgtactcccaaagtttgccaattaatcagtattggcatttgttgatacttggtgtcgtattaggactgttgggatacgtttatcagaaggtattattgtggttaccacaactttatgcgaagctcccgctgccaaaagcgtataccggattagtgccattattatgtgttttgccgattggttatttctggcccgaaattttgggtggtggcaatggattgattgcacaccttggacaaaatttaccgacaaccagtgtggtggccggtctattcctattacggtttgttttttcaatgatttcatacggttcaggattacctggtgggatttttctaccgattttatcactaggagctttaatcggtgccctttatggactcataatggttcaacttggttggttagcaccagtttatgttcccaacttaattatttttgcgatgggtggttactttgccggaatcgggaaggcgccatttacggccattctactagtgaccgagatggtaggttcgctcgtgcacttgatgccattagcaattttatcgttggtggcctacatcgtcgttgacttaatggggggcgcgccaatttacgcatcattattgcaacgcgcacttggcaaaccatatcgtaagttagcaacattctctgatcgcttggaggtaccagtgtttgcgggcgcaccgttagaggatcgccaagtccgtgaagtggactggccaaagacatgtttgttaatcgcgattgttcgtggcgaatccgaactgattccgcatggtgatacgttgattcgtgctggtgacacgttgattgtgttaacggatcatcagctacgggcgacggtgcggcggcaaattgaagacgctgcccaagccttgcgaaatacggatgagaatctcgtgaaataatcgataaaaaagtggtgattaactactttttatgctaaagtattaaaagacagtgtagatagaaaggtagggaattaggttggaaaatcttatcctgaacttattattaatcgattcaatcttgattgtgatcgcagtcatgatgcaaccaagtaaacaacaggatgctttgagtgcgttatcaggtggttctggtgatttatttggcaagcaaaaggcccgtggtttcgaagctttcatgcagaaagtaaccgttgttttaggggctttattcttcgtctttgcattagctttagtgtacttatcatcacactaatacatgtgagacgggtcgaattctaataagaacgttgatgcggtctcctgttgaatggcaggagacctttttaaatgaattcaagcagtaaggactttgggggtgagcgcatgtcttatcggttgccgcaaccgttttattttgacggtggttcagtcggggttgtgttgttacatgcttatacaggtagtgcgaatgatgtccgtatgatgggccgctttttggagaaaaatcagctggcggttagtgcaccacagtttgcagggcatgcaacggctgatccaaccgagattttaacgcgcggttctgtcgatgcatggtgggccgatacggtggctgcgattgagcagttatccgcggctaacaaacaactgttatttgttttcggattgtcattaggcggattgtttgccatgcgggcattagaagaactaccacaagtttgtggtggtgggatttttagtgcgccagtactcgaaggaccgactgctaaattgacgccgctctttggccaatatgctaatcgaatcatgcagttaatgggcgtcccggctgcgcaacagacagcacgtttggcgactattaatcagcaattaccacaacaacttgcatcaattggcattttcagtcgacaagttgtggctgacttgaagcaaatcggagataaaccggtcttcatcggtcaaggcggacaagatcaagttattgatccaacacaagcccaattcttacaccagcaattaacgcaacaaaacataacagttgattatcattggtatccacaagccggccacgtcattacggtcgatagtgcgcatcaccaattagaaacagatgtcctagaatttataaaccgttttaagaaatgagaaagaggtgttgatgtgacacaagttgaacagatgaaagcagcgattcttgcaatttttgaagcagatgcaacgcaacaattaaacgtatccgaaattagtgaacgaatcggcgttgccggttcacaagggttcaaagacctagtgaaagtattagcagaattagaaggagataagacattgaatatggacgatgccggtaagttcagattaccagctagcaaccgccttgttgaaggggtcttccatgctaacgatcgtggctttggcttcgtttcaatcgttgataaggaacctaatgatccagatatctttatcgccccacccaatacgaattttgcgatgaatggtgacacggttgaagtggccatcattaaagaagccgaagaaaacagccgccgcggtcctgaaggaaaagtggcgaaagtgattacgcgggggattgaagaaatcgtcggcgaatttatgccttattcagatatccaaaaagaaaaaacaggctggattggatacatccaaagtcatgccaaaaaattaagtaattaccgaatttatttaacggataatgggttacatccacaaaagggtgacatggtccaagttgacgttaccggttacccaagtgttgaggcgccaggtcaaatgctggggattgccaaacaagtacttggtaacaagaatgatcccggcgttgacgttttatcaatcgtgtatcaacatgatattaagacggacttcccagaagaagttcggcttcaatcagaagcgattccagatacggttttagaatctgataaactaggtcgtaaagatttaacggatcaagacgttgtgacaattgacggcgacgattctaaagattttgatgatgcagttaacgttaaaaagttggcaaacggcaactactacttaggggtccacattgctgatgtgagttactacgtcactgaaggttcaccattagacgttgaagccttagaacgtgggactagtacttatttaactgatcgcgtgattccaatgttgccattccgcttatcaaacgggatttgctcattaaatccagacgttgaacgcctcgctttaacgtgtgaaatggaaatcaatgaacacggcgtggtaatggatcacaagattttcccaagtgtgattaagtcaacagcgcggatgacatacaaaaacgtcaataagatcttaacagatcaagatgctgacttacgggcgcaatacgaacggctcgtgccaatgtttgaaacgatgtcagaattacatgaaattctcttgaagaagcgtcataaccgtggtgcaattgatttcgaagaagacgaagctaagattatcgttgatgaaaatggcaaggccatcgacatcgaattacgccaacgcggtctttcagaacgcatgattgaatcatttatgttggctgctaatgaaacggttgcagaacattacagtactgctaatgcacctttcttataccggattcatgaaacaccagatgctgataagatgaagaatttctttgaatttatcacggcttatgggattcaagcacacggttcaagtaagaaagtgacgccaatgatgctccaagaagtcttgacgcaaattgaaggtcaacctgaacaaccgattattacaacgatgttattaagaagtatgcaacaagcacattattctgatgaatcccttggtcactttggtttgggtgcggaattctacacgcatttcacgtctccaatccgtcgttaccctgatttgatggttcatcgtttgattcatagttatgccacaaatgggatgacgattgaagaaaaagaaaaatgggcacctaagttacaaccaatcgcagaacaaacatcccttgaagaacgtcgctcaatcgatactgaacgggaagtcgttgatcttaagaaggctgaatacatgcttgataaggtcggtaatgaatacgacgctgtgattagttctgttaccagctttgggatgtttatcgcattaccaagcacggttgaaggcctcgtccacatctcacagatgaaagatgactactatagctttgttgaaagccaattagcccttgtcggtgaaagaacgcataagatgttccgcattggccaaccagtacgggtcaaggtcgcgaatgttgatttagatgcccactcagtggactttgaattattagccggtgaagaagtgccattggcttcggctgaaatcttaagcaagattgaagcacgaccaaaacgtccagcacgcccacgtgatcatgaaaaaggcggtcaacgtcgtggtgatcaaaagaaaaacaatcatccaagacgcccagctgcgaacaaggactcacaaaaacgtacttttaaaaagtaggtgattgaatggcaaagaaacatcctcaaaaaccagcaaatttaattgcacagaataaaaaagctggtcacgattataatattttggaaacattcgaagcaggcttagtgctcactggtaccgagattaaatcggtccgtaagggcaaaatcaacttacgtgatgggttcgcccgcgtccgtaaaggagaagcctatctcgaaaatgtccatatcagcccttatgaacaaggcaatcagtttaatcatgacccattgcgcaaccggaagctattgttgcacaagaaggaaattaccaagattggtgctttaacgaagaataaggggattacgattgtgccgttacgggtttatttgaaacacggctttgccaaagttttaatcggcgttggtgaagggaaacgggaatacgataagcgcgaaacactgaaacgaaaagaacaagatcgtgaaatggcccgcgcagttcggattaaaggttagtcctttaattaaaatctaagtataaagtcaaaaagctatcacaaaatttacttttgtggtagctttttctattggaagtatttggtttgtcggcggttacaagtgggtttttattacacaaaaattataaatgtcttcaaactgtaatataacgtcattaatctgcaatcttcttgcggggattgttgcgtataatcaagtctgagttatgaatggaggagtttaacaagatgcgatttagaaaactagcgttagctgttgttacctgtttagttgcaatggttacgatgggcacatctgttagtgctgccagtttgagcgaattacaagcccaagaaagcagtacccaaaaaagtattgatgatacaaattcgaagattcaagccactttaacgagcgtgaatgcgaagtatcaagaaattaatgccttaaaggaaaagattaaggataacgaaaaaaatatcgaacaagcacaaacgcttttgaaaaagcaacaagccactttagcaaaacgtaaaagctatgctaaggaacgcttgcaatcacttcaacgaacagccgatgaccgcaacgttgtcaacgcactattgtcagctgattctttgagtgatttcttcaaccgggcttacacattgacggttcttcaaagtgctgacaaccataatatggatgaattagcacagagttaccgtgatacacaagccattcaagataagttacaagctagcaagacagaacttgatgaacaacgaagcagtttggatcaacaatctgtcgaactggaacaacaagtggctggcttaaagaataatttaagtcaaagccaagcggatcttgcaaaaattgctaaagaaaaagcagaagaacaagcacgtgaagaagctgaagccaaagcggctgaagcagctaaaaaagcggccgacgaagcaacacaagcgccaattgcaccagttgtggacacaaatgcccagcaagccgatttagcaagcgctgctgatggcaaggccggacaagcgattcaagtgcaagcaacggcttattcaactgccgaacctggtttgagccattttggtgcaactggaattgatttaactaaaaacccaaattgtatcgccgttgatcctagtgtcattccattaggctcacttgttttggtacctggttacgggtatgcaattgctggtgacatgggtagcgcgattaaaggtcacattattgatgttcattttccaactgttgcggcatgtaagagttggggtcgtcgtcatattacaatcacaattattaagtaattttaaatacagccttttttgaggctgtattttttacttcgtggattgttttggtaaaataaataataaattatatttaataaaggttgtcagggcaactcataatgaacgttgttgatgattattagtgaaagttagttgaaatatataatttaatactatagactatttatattgctttaaatcgaagtacggttaagattagctgactaagtattatttagatcggctatcttagaacacggaagaattgaagtactgaatagtgtgagtatgaaacttatcgatggttaactattgatactgaaagtttcagcatgtaggaggaatagaaatggatacgagtaataacaccgatttactcggtagcacatcagcagattttatggaattcgcaggtttataccggtggttgattaacaaccttagcgaatcaatgagtcgtgaaagccaaaaatacggtttatctttcgaccaatttttagtgatgcacgagattcaaaatgcgaataatgaaacaactaacagtgcattggcagataagatgcaagtgagtcgttcagcgatttcacgtcaatgtcgttcattacgtaagatggcttttatcgcagaacaatctgatgaaaatgaccaacgcattcgtcgtgttcatttgacggaaaagggtttggaagtttatcgtcatctcttgttctattacgtagacttgtacaaagatttacaaaatgaaatcggccaagatactgttggcgcaacaatcgaccaaagcaaaaaaatctttggtcgcatggcatcaatgaacatggatcgcccagaagcaaaataaacgttaaaaaaggccgcaaccatttgttgcggcttttttttgtgcgattagcaacggtcgcgcataatgacgcgcgtcactttctttgttagaatagagctagtcactttacgaatgtaggaggaacaacatgggttctcaaaaaaaattattattagtcgacggcaatagtgttgcatttcgtgctttttttgcaatgcaccaagctttagaccatttcaccaatcaggcaggactgcacactaatgcgatttatgctttcaagaatatgttggatattattctgaaaaagattgaaccaacacacgtgttagttgcttttgatgcgggcaaaaccacttttagaaccgaacaatttgccgactacaaagggggccgttcaaaaacgccacctgaattaacggaacaatttccttatatcagagaactcttaacagcatatggtattcagtcttatgaactcgctaatttcgaagcggacgatatcattggtacacttgctaaacaagcagaagctgatggtttcacggtcgatatcgtcactggtgatcgcgatttaactcaattgacgactagtcagacaaccgttaacatcactgttaaaggggtcaatgaaattgaagcgtatacccctgaacacgttcaagaaaaactcggtttagaaccaagccaaattatcgatttaaaaggattgatgggcgatacctctgataattatcccggggtgacaaaggtcggggaaaagactgcgcttaaattgattacggaatttggaaacattgaaggtgtctatgaacatgtcgatgaaatgaaaaagagtaaattgaaagaacatttgattgaagatcgcgacctagctttcacgagtaagacactggcaaccattaaacgtgacgcgccaattacgattggcttagacgatgtggtgtacaacggacctgatatggcagctttggttgctttttaccaagaaatgaacttcaagtcgtttctaaatcaattagatgttgcaccagttgaacccacggctactgaagactatcaatttacagtattaacccttgataacatcgccgatgtcgtgacaaccactgaaaacgttgcgtttggcatcgaaatgttaaccgacaattaccatacagcggacttgattggcttttacattggccgaccagaccactggtatgtcagcgacgacgtaacactcttgacagaatcggttttaaaaacgtggttagaagatgctaaacgtccgaaagcagtttttgacgtgaaacgcaatcaggttgcggtgaatcgcttagggattcacttagcgggggttcaatttgacttactattagcgtcttatttgttgaatacaacgaataacagtaatgatcttggaacggttgcaaatttacatcagtatcaaaatgtccaaacagatgaagctgtttatggcaagggggctaaacgcgcagttcctgtcgatccaaccgtgctttatcaacatctgattcaaaaagcagcagctatttacaaattagcaccacaattgacagaacaattaaaaaaacatcaacaattcgatttattcacggatatggaattgccattagcgctagttttagcggatatggaaatcaccgggattcgagttgatgcaagtcgcctacaacaaatggggggcgagttcagtcaaacgctgaagattttggaagaaaagatttatgcggaagctggcgaaacgtttaacatcaattcgcctaagcaactgggcgtcattctattcgaaaagatggggttaccagtgattaagaagaccaagaccggctattcaacggcggtggatgtcttggaacaacttaaaaaagacgcaccaattgtccaaaccatcttggattatcgccaaatcgctaagattcagtcaacgtatgtcgaaggattattgaagtcaattcatcaagataataaggtgcatacgcgttacttgcaaaccttaacgcagactggtcgcttgtcatcggttgatcccaacttacaaaatattccagtccgtctagcggaaggccgtaagattcgccaagcgtttgtcccaagtcaaccgggttggcagatgtttgcttctgattactcccaaattgaattacgagttttagcccacatttcgggggatgccaatatgcaagaggcattcaaggaagaccgcgatatccatgcgaatactgcgatgaagatttttggcttatcgagcgctgatgaagtgacaccagatatgcggcgccaagcgaaagcaactaatttcgggattgtttacgggattagtgactatggcttatcacaaaatattgggatcacaagggctgaagctaaacgctttattgaagcgtattttgaacagtatccaggtgttcatcaattcatgcaagatatcgtgaagaaggcgcgcgaagaaggctacgttgaaacgctcttccatcggcgtcgctatttaccagatattcacgctaaaaacttcaatttgcgctcatttgcagaacgcacggcaatgaataccccaattcaagggagtgccgctgatattattaagatggcaatgatcttgatgcaagcggaactgaagaaggcaggattacaagccaagatgcttttacaagtacatgatgaattgatttttgaagcaccagaatcagaaataccaatgttagaaaaattagtaccaagtgtcatggattctgcggtttcattagcggtgccgctgaaagttgaaagtggctttggaccaacttggtacgatattaagaaataaggggacacacaatgccagaattaccagaagttgaaaatgtgcgccgcggattggaacaattagtggtcggtaagacggttcaagcaattgagattcgctggtcgaaaattatcagtaatccagacgatgtttttgttgaaggtcttgttggacgccaaattatcggtgttgatcgacgcggtaagtatttattgattcgtttcgatcaaaacttaactgttgtgagtcatttgcggatggaaggcaaatacgaagttgatgatcaatccgtaccaatgactaagcacacgcatgtgatttggacatttacagatggacaacagttacgttatcttgattcacgtaagtttggccgaatgttattaattgaaacgggtcaagaaaacactgtttctggattgaaggacttaggggttgaaccaaccccaacaacgtttaagaaaaccgccttctatcaggcgttacagaaacataaaaaagcgattaaaccactgttgctggatcaaaaaattgtaacgggtcttgggaatatctatgtggacgaaacgttgtggttgagccagattcacccagaaacaccggcgaatttattgacgaaagctgaaacagatcgtttgcatgatgaaatcatcacagagttagaactggcaaccaataacggtgggacaacagtcaatacgttcttaaacgcggcgggtcacgctggggcctttcaggatatgttgcacgtctatggtaagaaagggcaaccgtgtgatcggtgccagactccgattgagaaaattaaagtagcacagcgtggcacgcatttctgtccgcggtgtcagattaagagagaagcggttcaatgacgtattttctaggtttaacgggtggcattgccagtgggaagtcgactgttgcggcattgtttaaagaacagggaatcccggtgattgatgctgatcaagttgctcatcaggtattagcgactaataaatcggtacaggcacaattgcaagcagcctttggcgaagcagttgtcaaaaatggtcaagttgatcggcctatgttgggccagcaagtcttcggtaacccagaggctttgactcagttaaatgcgattactgggcccgctattttgacagccattaaacaacagatgcaagcagcagatgcaccgctggttgtgttggatgtgccactgttatatgaacaacactacgagcaatattgcgatggtgttgcagttgtctacgttgaacgtaaaacacaattgcaacgtttgatggcgcgtaaccaattgactatagaacaggcaaatgcgcgaattgatagtcaaagtgatttggcgaccaaaaaagcgcgagcggatttcgtgattgataatcaaggcacacctgcaatgttgcggcaacgtgttttggcgttgttacaacagttgtgtcataacaagtaatacaagcggtcgaacagattattctgttcgaccgcttttttgtttggaaaaggcgaaatgccttgagactgatacattttttgtttagcctgcttgcctggcatgttatactactgttatactaattgttttaaaattggattgaatttgaaacgaattaatcaaaagataagaaggtgtcattatgctatgtccacattgtcatcagaatagttcgcgggtaattgatagtcgtcccacggatgaagggcgagtgattcgtcgtcgccgtgagtgtgagaattgtcgtttccggtttacaacgttcgaacgagtggaacaaaccccattgttggtaatcaagaaaaacggaacgcgcgaagaattcaaccgtgataaattattgcgcgggctaattcgtgctgctgaaaaacgccccgttacaatggagcaaatgactgaagtagttgatgaagttgagaataagattcgctcattgggtgaaaacgaagtctcttcacaagccgtcggagaatacgtgatgcgcttgttaccagatattgatcagattgcctacattcgctttgccagtgtttatcgcgaattcaaggatatgaatgtctttatgagtgaattacaagaaatgatgaataaagaaaagacgaagaaatcgaattaaggaagaggggttagccgatgtcagatgcatttgattttttgagtccaaaagacggcttttcagtgacaaaagctaactatttgaccgatttcgatcaaacagtcgtcacttacttatatcaaccattgatgggggctgttgcttacagtctctatcttttgttatggagtcaaaccaagaaagaaacggaacaacattttcaaacacatgcgactttgttaaatctgttgagtgttgatttacctgctttttatgacagccgcagcaaattggaagcacttggtttaatgcggacgtatcaaaaaaatgagggaactggccgcaagttggtgtatgaactgtatgcgccattgcaaccacaagctttttttaacgatgatttgttaagtgtggcattgttcgaagcggtccgcgaaacacggtttgtggaactccgtgactatttcaagctacgaccggtttacgccaaggattatcaagaggtcactaagaatttcttgaccgttttccatgtgcaaaacgatttattgacgaacgtgccaagcagtgtggctgaaactaaggcaatgtatcaacaaaaagcagctagcacaccgcagtttacctcggttgagttgcggacttttgattgggacctattacaagatgcaacggcgcaataccagattgatacggatcaaattctcaaaaatgaacagggcttgtttaatctccattatttctatggtctagatgagatggacttagcgcgtttgattggcttgacgatgaatgttgctgacagtacgattaatatggcagcgctcgaacagaacgtcttgaacaattacacacgacgtcagagtaaccggcaaacgccagctgctacaacaacgcaaaaaccgttagccgagttacaaaaagaatggcaaaaagccggctttaacgaacaggaattgcagtggctaacagaaagtcagggctacttgccagttgattatctcgaatacttgaaacaaaagaaccacggctttgtcgctaaaaatgaaatccgggcgttaaaggacttgcaaaaccgctatatctttaacaatgatgtgctcaatattttggtcgtttatatcattacgcaatatgatgggctcactcaggcgctagtcgatcggattgcgaaccagtgggctcaacaaggggttaagacggcagcggatgcgattttgcagattcgcgatttccaaaccaaacagacggcaaaggtgcaaaacaatcgccaaacgcgttatcagaataaaactaaaaaagaaccagtacctaaatgggctaaaccagattatcaagcgccaaaagaaacaaccacacctgagcatcagcatgaactagaagcggcgttgaaaaaaattcgtgaggggcgggaatcgtaatggaaaatatgggtaaagatttgacggattacatgaatcggcaaaagttaaaccaacagtttaataaattggtcgaagatgccttgaacgattccgatgtccaagcatttatacaagctaacaaagaccgcttatcacaagaaacggtcacgcgtagtgccgctaaaatttacgaatacgtcatcgaaaagaagaagttagctaatgggcaaaccactttggcaccgggttatgcgccaaagttagtcttaaataaccattttatcgatgtcagttatgagcctacggtaagtttattacaagagcgcgaacaagctgccttgcatgcacgagtgaagtcaattaatatgccgcgcgatattgaacaggccaagattgattcatacgatccaaccaatcggtttgacgcattgatcaaagctaccgcgtttatcggggcttatcggcaagcaccccatgattttcaccaagccttgtaccttagcgggcaattcggggttggcaagacttacttgttaggtgcgattgcaaacgaactggcgttatccgggtttgaaaccacgttgattcatttcccgacatttgcagtggagatgaagaatgcaattgggcaaaacaatgtgttagaaaaggtcaacgtgataaaaaaagcaccgattctgatgattgatgatatcggtgctgatgcaatgagtgcgtgggttcgggatgaagtacttggcattattttgcaatatcgaatgcaagaacaactcgccaccttcttcagttcaaacttcacaatgactgaattagagacgcatttgacaactagcaaccaaggagacgaaccggttaaagcggcccgcatcatgcaacgtgtgcgctatttagcgcaagaaattgaagttggtggtcaaaatcgccgcttacaaccttagtaatttaggcttgctaaaaaagcaattaagtgttttaatagaatcaatcaatgatgaaagacaccttttaaatgaaccatcgcagagagaaaaacatagctgaaagtttttcacccccatttaattgaccactttcaaaggcaatacaactgatcgggtcgtttccgttatagacgcttaaagttggagaaccaaatgttggggtctcaatctgggtggaaccgcgaaattaattcgtccctgagctgcacaattcgtgcgtctcagggactttttttattgttgatgacaaattagaaggagtgaatagtaatggcagagattcaattaacttttccagatggtgctcaaaaggcatttgaacaagcaacaagtcttttagatgttgctaaatcaattagtacaagcttagctaaaaaggcaattgccggtaaattgaacggtgaattagttgatttacagcaaccaattttagaagatggggcaattgaaatcatcactaaagacgacaaagcaaccgatttgatggcaatttggaatacggcagcctttgttttagctgcaacgttgaaccgtgcttatcccgagatgcaattcggcgaagtacatgcaactgaagatggcttcttctatgataccgaaaacgaagctggtcaagtagctgtgaccgacttaccagacattaaaaaagcaatgagcaagttaatccaagctggcggggcaatcgaacgtgtcagcttagacaaagctgctgctaaaacactatttgctgggcaaacttacaaattagcattattagatgaaatggaaacagaccaagtcttagtttacaaattaggcgattttgctgattttgggttagcaccaatgctagctaaagtgagcgacgttaaggtctttgaactcttatcggttgccggcgcttattggcaaggtaaatcaagtaataagatgttacaacggatttacggaacagcttacaacaaacaagctgacttagatgctgacttacagcgtcgtcaagaagctaaagaacgtgatcaccgtgtgattgggaaccaattagacttattctttgttgatcctaaggttggtgcgggcttgccttattggttgccaaatggtgctaccatccgacgttcaatcgaacggtacatcattgataaagaagttgccaatggttatgaacatgtttacacaccaattctagcgaacttagatttgtacaaacaatcaggtcactgggatcactaccgtgaggacatgttcccaccaatggatatgggcgatggcgaaatgcttgaattacgcccaatgaactgcccatcacatatccaagtttacaaacaccacccacgttcatatcgtgaattaccaattcggttagctgaactagggatgatgcaccgctatgaaaaatcaggtgcgctttcagggttacaacgggtgcgtgaaatgactttaaatgatggacatacattcgttcgtcctgaccaaattcaagatgaattcaagtcaattttgaaattaatgattgaagtgtactcagacttcaatatcaacgattatacattccgtttgagctaccgcgatcctgctaataccgaaaagtactatgctgatgataaaatgtggaacaaagcacaaacgatgttaaaaggtgctatggatgatcttggtttagattacgttgaagctgaaggcgaagctgctttctacggtcctaagttggatgttcaaacgaagacagctatgggcaatgaagaaacactttcaacaatccaattagacttcatgttgccagaacggtttgaattacaatatgttggcgaagatggcgaaatgcaccgtccagttatgattcaccgtggtttagtatcaacgatggaacgtttcacagcttacttaacagaaatctacaagggcgctttcccaacatggttagcaccaactcaagctgtgattattcccgttaagaatgaattacattatgattatgcaaagaacgtcaaagatgcgatgatcaaacatggtttacgtgtgcgcattgatgatcgtaatgaaaagatgggttataagattcgtgaagcccaaacaagcaagattccttatacattagttgttggggatcaagaagttgctgacgcaacggtttctgtccgtaaatacggtgaagaaaacgctgctgaagaagcttcagacatgtttgtagatgcaatcgttgctgaagttggtaactacagtcgcgatggtaaagatcacaaaacaatcaacctataagcggttattaaaacgtccgaaatgttattttgacatttcggacgtttttttgtttttttaattgcgcacaactaaaaaagcggtataataaatatgtaaacgattccaatcgttgattaatgggaggcgttattatgacgatagaaaaatatcaagcaggttcagcagagcaaccattggacattattaacctctatgacttggaaaaagaagccggcgaagttgttcccaagggtggctttgggtatatttacagtggcgcgggtgatctttataccattaacgaaaatattacggcatttaatcacaaatacatcgcaccacgggttttacaagatatcgaaaatccagatacaactaccgaaatctttggcgatcacttaacatcaccaatcattatggcacctgttgcagctcataagttagtgaatactaaaggggaagcggcaaccgctaaaggtgtggctgattacggttcaatcttaaccatgagttcatttgcgtcagcaagtatcgatgatatggcaaccgcagcagatggcgcaccgcaatggttccaactctatatgagtaaggacaacgatatcaatcgtaagattttagatgaagcgatggcgcataacgttaaagcgattgtcttaacagctgatgccacagttggtggtaaccgcgaaaccgataaacgcaatcattttacattcccagtcgggttaccaatcgttgaagcttaccaaacaggtgtgggccaaacaatggatgccgtctacaaatcagctaaacaacgtttgaaccctaaagatgttgaattcatttctgaatacacacatttaccagtctttgttaaagggattcaaacagcagaagacgttgaaattgcacttcaagccggtgctaaagggatttgggtatccaaccacggtggtcgtcaattagacggtggccctgcagcctttgattcattacacgtcgttgctaaggcagttaataaacgggtaccaatcgtctttgatagtggtgtgcgtcgtggtcaacacgtctttaaagcattggctgaaggggcagacatcgttgcaatcgggcgcccagtcatttacggattagcacttggcggtgcacaaggggtacaaagtgtctttaactacttgcaaaaagaattagaattagtcatgcaattagctggtacacacaacattgacgaagtaaaagccacgcacttagtggacaatcattacggcaactaagtacacgtaaatttaaatgcgggatttccttgactttaaattcctaaccgagtatacttattttcgttgagaaataaagcagaagttcccgcttctcgccttagtagacacttgatgtctctgggctgatagtttctaattcggacgaactaagtaaccgaacaagcgggcctttctgttatgagagggccgctttttttattacttagctgcattttctctctaaactttatggaggtgaagagtcatagcaaaagatttgatggttaacgatggtattcgtgcacgagaattgcgtttgattgctcaagatggcgaacaacttggtattaagagtactcaagatgcaattgcattagctgatcaagctaatatggatgttgttttggtttcaccaaacgcaaaaccacccgttgctcgtattatggactatggtaagtaccgtttcgagcttcaaaagaaacaacgtgacgctcgtaagaagcagaaaaccattaacctcaaagaggttcgtcttagtcccacaattgaacaaaatgattttaatactaagttgaacaatgcacgtaagttccttggcaaaggcgataaagtgaaagcttctattcgtttcaaggggcgcgcaattacgcataaagaaattgggcaacgtgtattggaaagacttgctaaagaaacagaggacatcgctaaagttacagcacgtcctaaaatggatggccgtagcatgttcttaatgttagaaccgctaaaggaccaaaaataaaaaatctgtttctgatttattaggaggaaatatcatgccaaaatttaagacacaccgtgcttcagcaaaacgttttaaacgtacaggtaatggcggcctaaaacgcagccacgcctacacaagtcaccgtttccacggcaagactaagaaacaacgtcgtcaattaagaaaatctggaatggtttcaaatagcgatatgagacgtatccgtcaaatgttatcaggccttaaataagccatagcattttcggattcaagcaaaaattagatcagtacagcaacgctttgacgttgtttgttattcaaggaggaaattcttatgccacgtgttaaaggtggaacagtgacgcgcaaacgtcgtaaaaagattttaaaattagccaagggttatcgcggcgctaaacatttattattcaaatcagcaaatactcaagtaatggtttcataccgttatgcattccgtgatcgtcgtcaacgtaaacgtgacttccgtaagttatggattgctcgtatcaatgctgctgctcgtatgaacaacatctcatacagccaattaatgcacggtttaagagtcgctgaaatcgacatgaaccgtaagatgttagctgacttagctgttaacgatgctgctgcatttacatcagttgttgaagctgctaaagctgcattaaacaaataattaaagatcaaaaaaagagtctgggacaaaacttcgttttgttctagactctttcttttatcattataaaattagtggctaataacaatcttacctggggcatgatgactctcaaggagcttgtggccttcaataatgccttccaaagtaaatgggagcgtcttgaagacggtattgtgtagtaaaccttgatcgatcaattcatttaaatcttgtaaggcggttaaatctgcataatccttacgcggatagacagattggtaattgatgtcagcgcgttgttgatcgtctgttggtaagatggtcgttgaagtgaatgtgccacctggtgcaactaagttattgaggcgttcagttgattctggatcgcgacttaagttgataccgattttagcggtctgcgcaagtcgttcgaagtcagatggctgatcataagcaattacttcttggacaccgaatgagcgcagatagtctaggttagcactattggcaattgcaatcacgtttaaatgagctgctaagcttaattgaacgagtaaactaccaacggcaccactggcacccataatagcgattgtatcgccgtgtttaaagtttgtgaagtgcatcagcgtattgtaagcagtgatgccggcactgggtaaaccggctgcttcagcgatactcatgctggctggcttacggagaatcttcgcagtactagccgttacgtattcgctataagcacccattgatcggtgattgatgacgatttcgccaacgcggtaatcatcgacgtcagcaccaagttcaacgatttcaccaaccacatctgtaccaggaaagattgggaagggtaatgggcgcactgaatcttgtgaaccattccgtagtgcaacatcgtatggattcaatccagcagcgagcactttaatgaggacttggttgtcctttggagttggttgaggctgatcgaaacgttcgaaaacgtcagggccgccaaagtgattaaaaccgaatttttccataacaaacacatcctctcaatttctttaaacgtaccagagttggggctaaaagtcgattagtttgacttatggatttaaatggattaggaattagttggaaattatggaaattaaccgcgtaaaggtgcaatttggtgtcaaataccctataattaatcagtgactagattaaaaagaagtgcgtcagtaggcggttatatttcgaggactagcctagtctggcgaatgaccaacttgttggtcgtttgacggacgtcgctagccgcaaaaatacgcctactgaggcacgttagaaaagaagtgcgttcaaacctggtatactccgagcactagtctaacaaggcgaatgattgctgcaagcaatcgtttgacttgtgtcgctaggcacaggaatatggtttgaaaagcacgttaaagaaaagaagtgcgtcatccacggttagcttccgagcatttgcctaacttagcgagttggcgctgcaagcgccgatttgataagtgtagcaaagcgcaagaagctgttgatgaaagcacattaaagtcgaggggacagtacatgctaaagaatttcaagccaacttggatggtcaatgccatctacgacttaacaccagaacaacttaaggcaaaagggattaaggccgttttaacggatttagataatacgttaattgcgtggaataaccccgatggcacaccacagttaaaagcttggttagcacagatgcaagctgccgaaatcaccgtgatggttgtttcaaataacaaccatgatcgcgtgcaacgcgcgctcagtgaattgcaattaccattcattgctcgggcgaacaagccattggcaactgggattaccaaagcgaagaagcagcttggcctttcgcgacatgaagtggtgatggtcggcgatcaattgattaccgatatgcatgccggtaatgtggctggcgtccggacgatattggtcaaacccattattgacagtgatgcctggaatacatcgattaatcgattctttgaaaaatatattatgcaacaactactaaaaaaacacgcagatttaacttggcgggaggatttaaatgactgaaacacaacaaactgaggaagaactattttgtattggctgtggcgctcgcatccaaacaacggacaaagaagcactcggctatacgcctaattcagcgcttaaaaaaggcttggaaacgggtcaattgtattgccaacgttgttttagattacgacactacaacgaaatcagtgatatcaaattaaatgatgatgatttcttagccttattgaaccaaattggcgacagtgacgcgttgatcgtgaacgtcgtcgatatcttcgattttaacgggagtttaattccagggttacatcgttttatcggcgataaccccgtgattttagtggggaataaggttgatatcttaccatctgctcttaacccaaataaagtgatcaattggattcaaaaagaagcgaaagaacatggcttacatccggttgaaacgatgttggtcagtgctaaaaaagggaattcagttgatgaattattggccgtgattgaacgcgaacgtaaaggccgcgatgtctatgttgttggggtgacgaacgttggtaaatcaacgttgattaaccgcattatcaagcaaactgggattttagatagcgacgtgattacgacgtcacaattcccaggaacgactttagatcgcatcgatattccattgtatgaagatgatcatgcattgattgatacaccagggattatgcatgcccaacaaatggcgcattatttacatgataaagacttacggttgattgcgccgcaaaagcggattaaaccaaaagtataccaattaaatgaacaacaaacattgttcttgggtgggttagctcgttttgatttcattcaaggtgcacggcatggctttgtcggttattttgacaatgaactttacattcaccggactaaacttgaaaatgcagatcaattctacgctaagcaattaggggacatgctacagccaccacatccagaagatttagctgattttccagaactccaacggtatgaattctcaacaaagcaaaagagtgatttagtgtttgctgggttaggctggattacgttaccagaaaatgtcgtggttgcgggatatgcgcctaaaggtgtctcagtcatgattcggaaagcattaatttaattagggaaggaagtatcgcacgtgttaacaggcaaacaaaaacattacttacgcggtttagcgcaaaccactaaaccactttttcaactaggcaaaaacggcttaagccaaacttatttcgaacaaattgaagaggccatcgaaaaacgagaactcgttaagattaacttgttacaaacaacagaagtgaccgttgatgaattagccaacttcttaaaacaacatgacagtcgcatcgaaattgcgcaaaaaattggacgcacattggtgatttataaagcttcacggaaagaaaaataccaaaagatttcaacgattgttactaagctcggacgctaataaggcggtgatcagatgcaaagtgcaacgctaaagcagacaaatcatgtgactgaaccggacgtgttggttgtagaagatggccatcgcttgcaagtcggcattatggggggcacatttaacccgccacacatcggtcatttagtgatggcagaacaagttcgtagccaactcggtctcgataaaattttgtttatgccagatgccaatccaccgcacgttgatgagaaaaaaacattaccagcaaaacaccgtgttgcaatggtagaacgtgccatcgctgacaattcgcattttgaactcgatttaacggagattgaacgtggcggtgtcagttacacctacgatacgatcgtggcattaaaacaacaacaccctgaaatcgattattatttcatcattggcggtgatatggtcgactacttacctacttggtatcgaattgatgatttagtgcagttagtccaatttgttggtgttaaacgaacagggtatgctcaacaaacgccgtatccagtcttatgggtggacgcaccggtaattgatgtcagttcaacgcaaattcgcaataagattcaacaaggctgttcagtgcggtacttgttaccggacccagtctttgaatacattcaaaaagagggcctctatcatgagtgattttgtttatcaagaaaacatcgtgccgtatacacgggctgagttagtggctaaagttgccgctaacttatctgaaagccgatttgaacattgtttgcgtgtggaagccaccgcgattcaattagcacaaaaaaatggcgcagatgttgaacgcgcggcaattgctggtttagtgcatgactatactaagcaattaccagatgaaacgttcattgaagcgattaaaacgcaaggctttgatccagaactactcaattacggtaatgccatctggcacggtgttgttggtgcttatttcattgaacgtgatttagaaatccatgatgaaacgattttaaatgctgtgcgtcgtcatacgattggtgcgccagaaatgaccttgattgatcagattttatttgtggcggattttgtcgaacctgggcgcaattttccgggcgcagaagctgctcgtgagacagcaatggctgatttagcagccggcgtgcggtatgaaatcttaaatacattgacctttttaattcagggcaagaagcagatttatccgaaaacaatcgacacatacaatgcttgggtaccgactcaagccaaataaaggagaactttagtgaaaagtttagatattttaaaaattgctgtgcaagcagctgatagcaaacgagcagaagacatcgtcgcaatgaacatggaaggcatcagtttattagctgattacttcgtgatgttaactgggacgtcagaacgtcaattaggcgcaattattgacgtcattgaagacgcagaagaagaaaatggcgttttcgtaaaacacatcgaaggtaaaaagggttcacgttggatcttgatggactttggcgatatcgttgtcaatgccttcatgccagaagaacgtgccttatacaaccttgaaaaactttgggatcaagcaccacttgttgatgtttccgaatggttggatgaagaatgatttaccaaagctttgcaaccgtctatgaccgtttgatggaccattcattatatggtcaatggcgggattacacgttgcagacgttacaaaataaacatcgagtcctagaactagcttgtggggctggtgatttagccatcttgctaaaacaagcagggctagaggttgtcggcttagatttatcggccgagatgttgagtatcgcttctgaaaaggcttctgaagccgaggtcgagttacctttattacaaggcgacatgcttgacttaggcgaaattgggacgtttgaagcggtcacttgttttgacgactcgatctgttacatgccagatttagcgcatgtccaacaagtttttgaacaagtttatcgaactttagagccaggtggtcaatttctatttgatgcccattcactttatcaaatggatgagcttttcccaggttttatgtataacgataagacggcagaaacggccttcatgtggacgagttacgcaggtgaagtaccacattcagttgaacatgatctcagcttttttatctgggatgacgagattgacggttatcaagaacttaatgaattacaccatgaacgaacttatccggtggtagattatgttgcagcattagaagctgctgggttcaagaatgtatcagtcagtgctgattttggccaagaagccgttcaagaagatagtgtgcgttggttctttagcgcagtgaaataggcggaggacgcatgagaattacggggattattgcggaatataatccgctacataatggacatcggtatcaattgcaacaggcgcgggcagcttcgcacgcagatttagtgattgtctgcatgagcggtaactatgtgcaaagaggtgaacccgcgattttggacaaatggacgcgcgcacaacttgctttgagcaatggtgctgatatggtcgttgaattgccgtttgccagtgctgtccaacctgcagaccgttttgctgatggggccgtcaagttattggcggcgcttggttgtcagaccttagcgtttggcagtgaatatccaacgtttgactatcagcaagtcgggcaacagattttagctttaaaggccaagtcacagacgtttattgattatcaaaaaacttatgcgacgcagctcaatgagttttatcaagcagaattaaatttaaatttagatcaacccaatcacctcttaggggtcagttatgcggttgccaacgcgcaacttgaagtgccaatgcagttgcttgcgattaagcgtgagcaggcacaacacggcgatcaaacgattggcgcgggacaatttgctagtgccagtgctatccgacaggcggcaacaaagggtgatgactgggcacagttagccccagtgatgccgcattcgactttaacagcgctccagactcaatcgcatctggattgggaccaactatggccgctattgaaataccgaattgaaagtacaccccttgcccaacttcggcagatttatcagatgtcagagggcttggagtaccgtttcaaaaaggtgattcattcagtcaatcggtatgccgagttgttacaggcacttaaaacaaagcgatatacgtatgcacgcttgcaacgggtttgtttatacgtcctgttgaatattcaacaaacggatattgaacaatcattagcgcagcggcccatccatttgcttggctttaaccaagtcggccaggcgcatttgcacacgttgaaaaaaacgctcgatcacccacttatcagtaaggtctcagctaaattgggtgccgaagagggcccactggggttagaggtgcgagttgatcgattacaagaacagtttggctggcaatcacagaattttgcccgccaaccgatttttaaccaaagaaaggatgacgagcattgttaaaatggacagtccaatcattattaaaacatcgtgatcatccattgatgtttaaagaaacattgatgttaaaagaaagtttacaaaaaagagaagctgatgtcctagatgctacaccatttgtagtagacggtgaattaacggttgaccagcgcgctgtaattgcacgcgtacatgtggtcgggacattaacagtgccttcaacgcggagtttagatccagtagccttgccaatggattttgaattcactgaaatctacgttgatccagaagacgagcagttgggacgatttacggacgaagatattttgttcccaatcgaaggcgaagccctagagctacaggtagctgttgaagatcacattctcttgcacattccaagtcacatcctaacaccagaagaagaacaagatgatgtgatgccagccggacagtcgtggtcagtcatttctgaagaagcctatgctaagcaacaggctgaagaagaaacggcacccaatcctgaatttgctaagcttaaacaattattagaagaacaaaacaatgacgccgactaagtttggcgtttttttatacccaatttgttaaatggaccggaccaaatcagttaaaatgcttttatttaaagcgtaattctgctaacataaacacagtagacgcgttgtcgttttgatagtcaacaacgcttaaatttagaaatcatttaggaggccttttacatgagtcaaccacaaatcggtgtcatcgggatggcagttatgggcaagaacttagcattaaacattgaaagtcgcggttacaccgttgcgatttataaccgaacaggtgctaagacagaagcagtgatgcaagatcacagcgaaaagaaattggtaccaagctatacaattgaagaatttgttcaatcattagaaaaaccacggcgaatcatcttaatggttaaagccggcgctggtacagatgctgtcatcaacgaattgttacctttattagataaaggtgatattttaatcgatggcgggaacaccttctttggcgatacaattcgtcggaatgctgaactagataagtcaggcattaactttatcggaatgggtgtttctggtggtgaattaggcgcattagaaggcccttcaatgatgccaggcggtcaaaaagaagcttatgaattagttgcaccaatcttagaacaaatgtcagcaaaggctgaagatggccaaccatgtgtcacatacatcgggccaaacggtgctggtcactatgttaagatggtccacaacgggatcgaatatggtgatatggaactcatctcagaaagttataatttattgagaaacgttgttggtttatctgttgaagaaatcgctgatgtcttcaaagaatggaaccacggcgaattagacagttatttaatggaaatcacagcggacatcttaacgcgaaaagatgatttagaaacggataaaccaattgtcgacgtcatcttagatgctgctggtaacaaaggaactggtaagtggagttcacaaagcgcccttgaattgggtgtgccacaatcattgattacagaatctgtttatgcacgttatatttcagcaatgaaagacgaacgggtggctgcaagcaagattttaccagccccaaccgttgctaaattaacagaagataaaaaagaattaatcgaaaagattcgccaagcattgtacttcagcaagatcatgagctatgcgcaaggctttgaacaaatgcgggttgcttcagatcaatatgactggtcattaaactatggcgaaatcgctaagatctggcgtgaaggctgtatcattcgggcccgtttcttacaaaagattacggatgcctttgataaaaaagctgatttaaacaacttattgttggatgattacttcttagatattacaaagaattatcaaggcgctgttcgtgacgtagctgcaatggccatccaacaaggtgtgccagcacctggtttctcagctgctatcacatattttgattcatatcgttcagaagtattaccagcaaacttaatccaagcacaacgcgactactttggtgcgcacacataccaaagaacagaccgcgaaggcacattccattatacttggtataaagaacaatagagtgcgcaagtagacggggatgcgctgaggattagtggaatatcgtaaatgagcggtgaaaccgatcgtttgcggtatgcaactaaccggaagcggatgtctactggagcacgttttagtacaagagtgctgactattgcatttagtcattgagcattaataaaaaattgccattaatcccggttttaggattaatggcaattttagattaagcggaaatggctgcgacgggatgcgcgttttaaaatagagtgatgagtcgaacgtttttggctttaaggattaacagaaaaatgatgcttatggcggttcttagccataagcatcattttacggttaaccggaaaagacagttcgaggaagcacgtttctctaaacacccgagccgattattaaggcgcaggtgttttttcgattattactaaatcgccatcagatgagagtcagattagttagttatttaattggaactatgctagaatggaaaggtaagccgattttggcgcttgaggtttcttagagaattcttatcattgattagaatttagagagtccattaaaaattcttttttggggagtgactaaatgagtcgcatattgattattgaagatgagaaaaatttagctcgatttgtggaacttgaattaaagcatgagggttatgagacagaggtccatttcaatgggcgtactggtttagaagctgccttgaatgaagaatgggacgcgattttattagacttgatgttacctgaattaaacgggttagaagtctgccgtcgggtccgccaagttaagaatacgccaatcattatgatgacggctcgtgattcagtgattgaccgtgtttctgggttagatcatggcgcagacgattatatcgttaagccttttgccattgaagaattattagcgcgtttacgggcattgctacggcgaattgatatcgaaggcgaacataacgctgctaaacaaacgacggttacttaccgtgatttaacggttgaaaaagaaaaccgagttgttcggcgtggtgatgatgtgattgaactaacgaaacgtgaatatgaattattattaacattgatggaaaacgtcaacgttgttttggcacgcgatgtcttactcagcaaagtttggggttacgattcggatgttgaaaccaatgttgtcgatgtttatatccgttacttacgaaataaaattgatcgttctggcgaacaaagttacattcaaacggttcgtggaatgggttatgtgatgcgctcgtgatgcaggacgaaacggtagcatcaacaacaaataagggtcgtaaaatatcgttaaaggtgaaatgggcagctgcggttgggttggccatttttatcacctttgcgattttttcaattgtgatctttagtagtatctctaatatcttgctacacagagaagtcgataatgtgcacgatacggtgaccgtcgtacaagcgagattgtccagcaatgggccacatcttacagaaggctttgtcaccaatcaattggatccgaaccgtcacagccctaaagccatctatcaagatgcggttttaacgcggttagcacaacaggatgttacagttaagatttatgatgcaaacaagaagggtttgtttgcatcgcgcggggcgattggtccgtttccaaaaggcgatacggatacattaaagcgcaaagctatttttggtaagatgcggctgattggcattagtccgattaagacaagtcaaaaccgtgtaattggttatgtagaggtggtcaataacgtccgtgattataaccacgctatgactgaattaagaattgtgttagttgtggttgtcttttttgctatgttatttagtgcattgattggctatttattagccaaccaattcttgcgaccaatcgaagttatgaaaaaaacgatagaagccattaattcagagcctaattcagatgtccgaattcctgagactgggcatagtcaagatgaattatctgatctggtcagtgcgtttaatggtatgttgaatcgaattcagcattatttcgaacagcaagaccagttcgtcagtgatgtttcgcatgagttgcggacaccagttgcgattattgaagggcatctacaactgctcaatcgatgggggaaagatgatccagaggtactggaagaatctttagcggcttcgttacaagaaatcttgcggatgaaaaatttaattcaagaaatgcttgatttaacacgggcagataaagtcgtgactgaaggaacgactgaagtgaccgatgtcggggaagttgttcttcagaattaccataacttcgagatgttatatccagaatttaattttatgctcgacaatgatttgcaccaaccagcgctagtgcatgttaatcgaaatcacttagaacaaattatgattattctgttggataatgcgattaaatattcaacgatacgtaaagaagttcatattgccgtcgctagtgatgagcggtatgcgcaagtggccgtgcaagactttggtgaaggtatttcggaagaagataagaagaaagtctttcaccggttctatcgcgttgacaaagcacggagtcgggaaaaaggtggcaatggattgggattagcaattgcccaacaactcgttgaaggctatgacgggaatgtgtcgctagaaagtagcgttggctacggttctgtttttagagttgagttaccactgattcgtgaagtagaaccaaaatcagaagaaccagttaatacggattaaaaaagcggtgcgcttcaatcatctaattgattgaggcgcaccgcttttttttgttggttaagcttgtggcttatgccgttgcttacctgagttgcgtttgccagctactttaggtgtagcgacagttgggttgcttgtttctgttggtgtttctgtgacgtcggcagctggtttgactgctgctttttgagtgaacatttcttttgtgacaaccgtgacgattggtttttccttaatttcttgatcgatccgttttttaacacgaggcatgatgatgaatgtcgtgattaattgttgaatcaccatgataatcccaccggctaagaaataaagtgctaaaccggctggtgcaaataacgaaatgaagaatgtaatcgcaggactcattaggacggttgtttgcatttgtttcttttgttcagcaggcatcccgactaatgaaagtgcactttgaccgacatataagagggtcgcaatcacagtaatgataatgtttgggctcccaagaccgatcccaaagaagtggctacttgaaatttcaggtgagtattggatggcttgatacaaaccagagaagattggtaattgaattaataaggtcaaacaaccaagacttggcatcatgcttgaatcattttccttataaaccttcatcatcaactggctaagttcagccttttcttcaggggttgttgccgctttttgttgttcttggataatatctaattgcggtttcaagcgacgggtcttttcttgttgggccgtcatcttattcgattggttcaacattaatgggagtaaaatcatccgcacaacgaatgtgatgatgataattgcccagccgtaaccattgatgccaccgaaaacatcagcaatgcgttccataatatgttggagcggcacggcgatgtatttataggatgaaccatagattaagccggttgggactttgggatggctgctcattttttgtggaacacagccagcgagaaagaatgtaacggtcattgtaagcatcgcgagtgtcgcgaagcgtttagaatttttcataaatttagccctttcaagataagtttcaacaagtgtaactatacttgaaggggctaggtttttcaactgacaaccgaaaatttatgacacgctgacacattttcgagcggtgtttgaatgacacggtcgacgcgcccactaggggtgggagaagctttgacagcaccgataaatttttcgagtgcgtctgctgggcccatcgcaataattttaacggagccgtcgtcacgattggcaacggtacctgtgatatggagtttatcggcgaccaatttggtcatccagcgaaatccgacgccttgcacgcggccatagacttcaagttgaattgcattttgcattgtcatcacctcctcttcattgtaagctgttcaacccgatttggcgattaaaaagcgacccttgatagaatttacccactaagtcgcgtataatagaaagtactaaatagactggagcacaacatggaatacattcaatcgaatcaaaacactaaaattaaggcggctaagaaattaaccgttaagaaaaaccaacgtaaagaaaatacgtatctactagagggctggcatttagtccaagaagcaatccaaaataaggccgtcatccgccaagttttcgccactgaaaaatatgtggacgaacgcgcattgcgcggtctttacgatgaaacttttgaaattgcaccagaagtggcgcaacacttgagtgaaactaaagcaccccaaggcatttttgccgttgttgaaatgtctgaaacaccggtaccagaaaaattaacgggtcgttacttattattagatgctgttcaagatcctggtaatatcggcacaatgattcggacagccgacgcagcagactttgccggcgttgttttaggcaatggcagtgttgacttgtataatccaaaactcttgcggtcaatgcaaggcagtcacttccatttaccaatttatcaaggtaacttgatggactggatgaagaaattcaattcgcaagacgtcccagtttatggaacggaattaaatccagaggccatcagttatcaagatgtgcctaaagcaaatgacatggccttgattctaggtaatgaagggaacggcgtgaatgaaaacgtcttagcagccacaacgcaaaatatttacatcccaattccagggaatgctgaatcattaaacgtggcagtcgcagctgggattttaatgttcaagttgattgaagcttaattcttaattttttctaacaaacgtaactttttaaggcgtttaacttcttttttgaacgaaaagctgttatccttgtggcagaatttgaatttaaaaaatgtcaggagtctttgaatgaattcaacagcaaaatggtacgatgacgcggattacatggctctaattgccgatttattagctaaagatgaagtccaaaaattagcgaactatacgcaacatcatcattcagatcgtttggaacattcgctaagcgtctcttatcgcagttatgaacttgccaagaagtggcatcttgatacgcgagcaattgcacgcgcgggcttattacatgatttattctattatgactggcgtgatacgaagttcgatttaggcacacatgcttatatccatccgcgcattgcgcttcggaatgccgaaaaattaacagaactctcacctaaagaaaaagacatcatcgttaaacacatgtggggcgcaactgttagtcgtccgaaatataaggaaagttacattgtatcgatagtcgatgattattgtgctgtgacggaattttgtacaccaatgtggacgaaatttaaacaaaaagttctccgccaaacaccggcaattaacaagtaaagatgcttcaagctgataggttgctttttgcaacctttttcagtacacttcttattaataagtgtgaggtgaaaataatggtgattgtaaaagaaaacgcaaatgctgactgtcaagaggccttccaactgtgtcctaaatttgaaaagactttttcaattttaggtaagaagtggaacggcctgattatcgatgtcctattagaaaacggggcacaacggtttaaaaacttagtgcacagtgtgcctaagtgcagtgatcgcgtattggttgaacgattgaaggaactagaacaagaaggcattgttgcgcggattaccagtgatgattctgcgttgattgaatatcgattgaccactaaaggtgaagaattagcgccagtaatggctgctattcacgattggtcaaacgactggtatgcgacagaagcctagttgctaattgcggttatttacgttaaaatacaattattaaacaaagacgaaaaagagtaacctaatcattagttttcagggagaataatcagttgactgcaagttattcaactaagtttaggtgaaattcactttctgagttgaccattggtccggtattgcccgttagcgcaaacttgagtgtatgactggaatggtcgtaaactagggtggtaccgcgaagcttcgtccctttttgagggacgggctttttttgttgaaaaaaataaggaggaattgcaatgtcattgaaggaacaattagaaaacttacagcaaaagagtctgcaagaaattcaaagagttgttgatttagaggcgttaaatcaaattcgagtggaagtgctcggtaaaaaaggaccgattacagaagttttacgcggcatgcgtgatttaagtaatgaagaacgacctaaggtgggggcatttgctaatgaaatcaagagtgatttggcagaagcaatcgaaacccggaaggcagaattagaagccaagaaggcagcagcccaactggctcacgaaacattagatgttacattacctggccaaccggtcaaaaaagggaccccgcatgtcttaactcaagtgattgatgatttagaagatttatttattggaatgggttatcaagtcgttgctggctatgaagtggaagatgaaaaacataactttgaaatgttaaacatgccagctaatcatccagcccgtgatatgcaagatacgttctatattactaatgatttattgatgcgcacgcacatgtcacccaatgaagcacgtgacttggaaaaccatgactttgctaatggtcccattaagatgattagtcccggccgtgtttaccgccgtgatacagatgatgcaacgcattcgcatcaattctatcaaatggaaggccaagtgattgataaaaacattacaatggcagacttaaagggaaccttagaatacacgattcaccatatttttggtgaagaccgtgatttacgtttccggccaagttactttccattcacggaaccatctgttgaagtggatatttcttgtttccgttgtgatggtaaaggctgtaatgtctgcaagcaaactggctggattgaagttttaggggctgggatgacacatccgaacgtcttaaaagccggcggtgtcgactcagatgtctatggtggattcgcctttgggctcggggttgatcgctttgcaatgttgaaatatggtgtggatgatatccggaacttctacttaaatgacgttcgattcttaaatcaattcacacaggagggctagaccatgaaagtttcttacaactggttaaaagattatttagatttaacaactgccccagaggcattggctgaaaaaattacccgaacagggattgaagtggctgatgtcgcgcaaaagagcgcgggcttgaaaaaaattgtggtgggacatattttaagttgtgaaccccatccggattctgatcacttgaatgtttgccaagtggatgttggtgaagatgaacccttccaaattgtttgtggtgcacccaatgtcgctgctggccaatatgtagtcgttgcattacctaattctcggattgctgacaacgttaagattaaaaaaggcaagatgcgcggcgtggtttcaatggggatgatttgtggcttacaagaaattggctttgccgatagcgttgtgcctaaggaatatgttgatggcatctttgtcttcccagaagcaattgaacctgggacagaagtttatgaagcacttgggatgactgattacattatcgatcttgacctcaccgctaaccgagccgatgcgcttggcatccacggtgtggcccatgaagtggccgccattgaatcattgacacctcattttgaagatatcgtagtgactgaaagcaacgttcaaacagctgatcaattgactgctcaagttgctgatgaacaattagcaccaagttatcacttgcgtatgttgcaaaacgtgaccgtccaaccaagtccaatgtggctacagacgcgtttatggaatgctggcattcgccccattaataaccttgttgatgtgacgaactacatgatgttaacgtatgggcaacctttacacgcgtttgatgcggatgctctaacgggtgatcacaaacaaatcgaagttcgtttagccaagacgggcgaaaaattaacgacccttgatgaaggcaaacatgacttaacaaatgaagatatcgtcattacagatggtcatcgaccaattgcgctagcaggggtcatgggtggtttgaactcacaaattactgctgatacgaaaaatgtgattatcgaagccgcagtttttgcaccaactgcagttcgtaaaacggctcaacgccataacttgcgttcagatgcgtcatcacggtttgaaaaaggcgtgaatgttgctgatgttcaaacagccttagatgctgctgctatgatgatggcagaccttggtaatgggcaagtgactgctggtacagttagcccaactaacttagtgccaactgacaaagtgattgaaatcgaagctgaccggattaatcgcgtcttaggcacagagattgcaacgcaaacaattattgaattattagaacgatttggttttagtgtggtcaatactgataatcatttaacagtaacgattccaccacggcgttgggatattgaaatccaagcggatatcattgaagaagtcgctcgtttatacggttacgataacttaccaagcacattgccaactggcgatatgacaaccggggcattaacgactgaacaaaaggcactccgtaaaacccggcatacacttgaaggtgctggtttaacgcaagcaattagttatgcattaacgacccctgaaaaagcgcgtcaatttacgcttgttgattcggcgctgacagcacttgattggccaatgacgcaagatcatgcgcacttacgcatgaacttgattactggtttattggacgatgctgcttacaatgtggcacgtaaacaaactgatcttgcactatacgaacaaggacgggtatttttaaaacaagcagacgaccaagttcggccaacagaaattgaatatgtggctggcttaatgagtggcaatcgccaaatgaagacttggcaagctgccgcagcaccagttgatttctacacaatcaaaggtgtggttgaaatgttgatggcaagttacaacttagcggatgcaatcagttatcaaccaacacaagcttatccagaaatgcatcctggccgaacggcagccatttacgttggtgaacaactggttggatttgttggtcaaattcatccagcagttgcgaaagctaatcatttaaaagaaacttatgttttccaattagatttagcacaaatcctagccttgccaacccaaacagtgattgctaaaccagcacctaaattccctgaagtaacgcgggatattgcaattcaggtgtctgatcaagtttcaaatgccgcaattgttgaagccatcaaagcaaagggtggcgcccacttagtttcagttgaacttttcgatgtttacgcagggagtcatattgaggctggtgagaagtcaatggcttacaccttaacgtacctcaatgaggcagctactttaacagaagaagaagttaacgctgcttttgaaaaagtagtcgctgaattagttgctacttttgatgccaaaatccgttaatctcgaatctttaatgcaatttttgaataatttggtataatgttttaaggattgtatttaaaagagcaattaggaggtcatcctttgaagaaagttgatcaaaaggagccagtaaatcaagaaaaagcggcacaatcattgtacgaagaacgccgtgcagaaaaaaaagcagcaaataaaattgtctattggattatcggtattctattagcgcttgttgtcattattggattcatgggatatcgctacgtacaagcatctcttaaaccatacgacaccaaagcaaaacaagaaattaccgtgcgcattcccaacggctcaacgaataaacaaatcgctgctattttgcaggataaaaaattaattcgaagcgcgccagtctttaattattatgtgaagactcataatttctcggatttccaagccggttatcatgtgttgaaacaatcaatggggttagataagatcatctctaacttacaaaaagaaggcacaccagcccgtcctcgcgatgtgaagggcaaattgttagttaaagaaggggtcactttagaagaaattgcggccgaagttggtaaacaaacaaaattctctaaagcagccttcatcaaacaagcgaatgataagcaattcttagcaagtttagagaagaaataccctgcattattgtcatcaacaatggctcaaaaggatgtccgctatcacttagaagggtaccttttcccagccacttacgaagtttataaagatagtacattaaaagaaattatcaccgaaatggtttcaacgatggatcaaaagatgcaaccttattatgcaaccattaaggataagaagttaaccgttcaacaaacgttaacgctagcttcattggttgaacgtgaaggggtcacagccgtcgatcgccaaaagattgccggtgtcttctttaaccgtttagacatcgatatgccaattcaatctgatatttcagtaatgtatgcattaaatacccacaagacacacctttataacaaagatactaaagtcgattcaccatataacttatatatcaataaaggttatggcccgggaccgtttaactcacctagtttacagtctgtcacagccgtcttgaatccagctgatcgtgatcaaaattatctctactttgttgctaacttgaagacaggtaaagtatattactcaagaaccttcgaacaacataacgatacaacagattcgattgaagattaggttcatttaggattatcgaagtcgaccgccattggaggtcgacttctgtttgcccaaaaagaagttgagaataaaaggagcgtcccatgtccagtcaaaaaaaagcacccatcattatcggcgttacaggcgggtccggtagcgggaaaacaaccgttagccaggctatcgcccaaaaatttgcgaatcactcagtgatgttattaccacaagatgcgtattacaaacggcaagatgttccgtttgaacaacgccaacaaacgaattatgatcatccagatgcttttgacaacgatttattaatcgaacaagcatcaatgttaaaaaatcatcaagccattgaacaaccggtctatgattataaaattcataatcggacggaggaaattcaacgggttgaaccgcaagatgttattatcttggaggggattcttgtattggctgatgcccggttacgggatttgatggatattaaggtttatgtggatactgatgatgatattcggttattaagacggatgcatcgcgatatggaaagccgtggtcgaacgtttgatgatgtggttggccaatatcttaagacggtaaaacccatgttccatgaattcattgaaccaaccaagcgttacgctgatttaattgtcccagaaggtggcaataatcgcgtggccattgatttacttgtaacaaagattcaatcaatcctaaatgccgattaaagattgagatttgacaaggacgtacacagtaattaagatagtcagtattattaattaaaataaagaggtggataaaatggtacaaaaaacttatccaatgactgcagaaggcaaagaaaagttagccgaagaactagaaacactcaaaatggtaaaacgaccagaagtcattgaccggattaaaattgcacggagctttggtgatttatcagaaaactctgaatatgaatcagctaaagatgaacaaagctcattggaaacacgcatcgcagaagttgagaatatgttacgctttgcagaagtaatcgatgttgatagcatcgcagctgatgaaattgctgttggtaaaacagttagctttacagacgacgaagatggtgaagaagaaacttaccaaatcgttggtgctgcagaatcagacccattcagtggtaaaatttcaaatgattcaccaattgcccaagcattacttggcaaacacgttggtgataaagtagctgtgcaaacaccaggcggcgacatgcacgtcacaattacagaagttaaataaagtgcgtttcgaacgggttagtctttgaggattaacgtaaaaacgggtgttatggtcgaattttgaccatgacgcccgttttgtagttaaccggaaaaggttgttcgaaaaagcacgtttaagaatagagtgcttttgggtgcggttagcaactgagcattaatacaaaattggcagtcatccagattttaggatgactgccaattttagattaagcagaagttgttgcagccaaaaagcacgtttcaaaaaagccacggaaatcaatcccgtggcttttttattttgccgttaattcgttaatcagccttgagacggattggtgtttatctggtttgcttgtataataatattaatcagttgaaaggggaccgtaaatatgccgtttatctggcgcgtttttttaataatagaagcgattatcttcgggacgttcatttggcagatgattacgatacccgcaaatttagtgttcatcattgcaggtattttactcttagtctgggccaacaaacgtcgtagtaaaggtaaaatcggtgtctggacgactttgttaacgatggtcggttgcgtagctgttacggtaccactgttaattaatttctcgttatggttaatgattattgttgcggtcgtctttttagccttaaatcatagccgaatgggacagtttagcagccgcaatatgaatcagttgtttgataatgccccttggcgcaagaaaaaatttattcccgttaatacgacggaacccaccgcgaaaaagacaacagtcaagcggcatagttggtttggtcatcagacaattggcaataacatttttgaatgggatgatattaacttcgcggtcgctgccggtgatacaattatcgatttagggagcaccattttacccaagaatgacaaccatattgtcatccgtaaggggtttggaaagacacggattttagtgcctgtcgggaccggtgtctatcttgatcactctgcaatgttagggagtgtgacaatcgacaatcagcactataatttgaaaaatgagtcgattcagttgtatagtacaaactatgatgaagaaagtcgccaccttaaaatcattaccaacgtaatgattggtgatcttgaggtgatcttagtatgagcaagttaacgcggagctttatatggatcagcacgagtttgttgacgcttctgttttcagtggcgttattttttgcgtatttctacagtacgcatcaggaacaatggctgattagtttggccacgaagcaattattctatgtaccactgattgtttatattgtggtggccgcaatggcagtaggctttttagttaccgcaatcgtctatcttgtcgtacgtaagcaattatcccatactgaaagccagttacaatttttactttctggacagtatgaatcgcctgtttttcagattagacagagcgaaaccaatgactacgcgatgtcaatcgagcaaacagttgaacaattacgccaaaaaatgatacgcttacaacaagagattcaaagttatagtgatcggccgaccgtgattgctggtgaaaccaaggaagaaattctagcgcaagaacggcatcgtttagcacgcgagttacatgattcagtgagtcagcaactatttgcggcgacgatgatgttgtcggcactcagtgaagttgcgcaaaaacaagctgataacgcgcagatgttgcagtccttaacgacagttgaacgggtgttaaatgaggctcaatcagaaatgcgggccttactcttgcatctacgaccagttaatttggaaggcaagagtttacgcgatgggatcattcagttattgaacgaattgaagaccaaaattgcgattcagattacatgggacattgatagcataacgttaccaagtggcatcgaagataatttatttagaattgtccaagagttgctgtcaaacacactacggcatgcgaaggcccaagagattgaagtatacttgaaacaactcggtcagagtgttttactaaaggtaattgatgacgggaccgggtttgatacgaatgctgagcaaaaagccggcagttatgggttaaacaacattgtcgaacgggcccatagtgttggagggacggcaaaaattattagtttgcctaaccagggaacgagtgttgaaattcgagtgccactattaaaggagaccaattaagtgattaatgtattgatagtagacgaccatgaaatggtgcgattaggcatctcaacgtatttaggggttcaagacgatattcatgtcgtcgatcaagccgtcaatggtaaagaaggtgtcgaaaaggcgcttgcattacgtcctgatgcgattttaatggacttagtgatgcctgagatggatggcattgaggccaccaaaacgattttaaaggcgtggcctgaagccaaaatcattatcttaacgagttttatcgatgatgagaaagtttatccggcgattgaagccggtgcggccagttacatattaaaaacttctacagccgaggaaattgccaatacgattcgtaaaacggcgcaaggacaatcggttttagagccagaagtgacgaataagatgatgaatcgcttaacacatccggctgaacctaagctatatgaagacttaactaatcgcgaacgtgaagtcttaggcttgattgccaaaggccgtagtaatcaagagattgcggatgaattattcattacgttaaaaacggtcaagacgcacgtttcaaatattttggcgaagttacaagtggatgatcgcacccaagcggcaatttatgcgattaagaaccaactagtcgattaatcaggaggagttcaacatgcaaattcaggtgtcagatgcagcaagtcaatggtttcgcgacgaattagccttacaatcgggggatgcagtccgcttttttggcaaagtgtatggtcaaacggccgtgcatgatggcttttcattgggcatggaacgcgctactgttgagcagccaattggttcggttgttaaagatggtatcacctattttgcgagtcaatcggacgaatggttttttgccgattatgatttacaggttgattacgatccagagcttgaagaacctaagtatcaatttgaacgtcgttagacgataaaaagccccgccaaatcatttagcggggctttttattttgggttaaaaggcgaccagtacgcgcccagttttatgcgtcttctggctaagttctcgggctaaatcagaaaaggcgaccaagttaactgttggccaaatttccggtttaaacgtcgtggcgagtaattgccagagttctttacggtctttgcgtgggtaatagactgaatcaattccggctaaggtaatcccacgtagaataaacggcatcactgttgtttctagggttgcaccagcggcattgccacaagttgctacgaatccgccggcacaaacttgcggtaagatgtgggctaaaacaggaccgccaagcgtatcaataaccccggtgaatgtctgatggctgagcgctttaagcggaccagcagttaggtcagctgtattaataacatgggtcgcaccaaggtgcaataaataatcggtttgttgcaagtcacgcgtagttgccgttagatttgtgaagccaagctgcgcgaggatggtaagtgcgaaacttccgactccgccagtggcacccgtaattaagagtggggagtcatgatcggctgtaaaggcttggcgtaataatttgctgagcgcaattgcggcggtgaaaccggccgtcccaaactgcatcgtttcagcaagactaagattttcgggcaacttaaagagccattcactagggactttgacatattcagcgtagcccccagcgattgtaatgccagtttcataacccgtacataacacctgatcgcccgcttcaaagaacggattatccgattcgacaacttcgccagcaaaatcaacgccaggtgtcatggggtagtgacgtaagacgccacttttaggattcatagcgagccggtctttgtagttaatatcagaataggcgactttgactaacaccccgtctttagcgaggtctggcgttaacttagtttgataagtggcactgacagtagtatcggtttgttctaaaacgagtgcttgataggcgaccatatgattacaacctcatttctaaataattatttaactccattatacaacaatgttcgctttgaattggcattgcgtctcggaaacggtataattaataggatattagtcaactaataacgagtctgagagtgctaaagataaaggggacgaagaagaagatgcaacaaccaatggtggaatttaaaaatgtcattaaagaatacgacgatgtccaaattttaaagggcatcgacattgcgttggaaaaaggtaagttttataccttacttgggccgtctggctgtggtaagacaactattttaagaattatcgccggatttaccaatgcgtctgccggggatgttttatttgaagggcagaagatgaacgatttaccggccaataagcgccaagtcaatacggtttttcaagattatgccttgtttccccatctaaatgtctttgagaatgttgcatttgggttaaatctacgtaaagttaaaaaagcagcgattaaagaaaaagtgattgaagcccttaaattggtgcgccttgccggatatgagaatcgcgaaattagtgagttatcaggtgggcaacaacaacgagtagcgattgcgcgcgctttggccaatgaaccaaaagtcttgctactagatgaacctctatcagcactcgatatgaaattacgaaaagatatgcaatatgaactacgcgatttacaacaacgattagggattacgttcttatttgtaacgcatgatcaagaagaagccttagcgatgagtgatgaaatttttgttatgaacgaagggcgcgtgttgcaaagtgggacacctgtcgacatttatgacgaaccgatcaaccatttcgtagccgattttatcggggaaagtaacattctgccaggtaaaatggttgctgattatcaagttgaaatggtcggcaagcagttcgaatgtgccgatgccgggatgcgggtcaacgaagcagttgaagtggtgcttcgtcctgaagatctagacattgttgccgttgaccaaggccaattagtggtaacggttgatacgcagctatttcgtggtgactattatgaaattacggcctatgatgcagatcaaaaccggtggttgattcattcaactaacccagctaaagatggtcaacgagtcggcttattctttgaaccagaagacgtgcacatcatgcgttttggggaatcagaagaagatttcgatgcacgacttgaaagttacgaagaggaggactaaggcaattgcgtaaaaaacaatggttatattacttaccatatgccctctggctaattttgttcgtcctcgcaccagtcgcattgattgtgtaccagtccttctttgatatcaatgggcatgcgacattggtcaactacacgacctatttccagtcaggcacttacttgaagatgacattaaattcgttatggtacgcctttttaattacgctgattacgctattaatcagttatccgacggcgtattggcttcatcaaacgaaacataaacaactttggctattattaattattttaccgacatggattaacttattactgaaagcttatgcgtttatcgggatttttagtcaagatggtgccattaatcattttttggggtggttcgggattgggccacaacagattttatttacgaatttcagtttcttagtggtggcgacctatattgaaattccgtttatgattttgccgatatttaatagtttagaagaattgaatccatcattggtcaatgcaagtcgtgatcttggcgcaagtaattggcaaacctttacgaaagtcatcttaccgttaacaatggctggggttaaagccgggatacaggccatctttattccatcgttatccttattcatgttgacgcgtctaatcgggggtaaccgcgtgattacgctggggactgcgattgaagaacacttcctcacaacaatgaactggggaatgggctcgaccatcggggtggtcttaattgtcgccatgggcttaatcatgctggtaaccggggagcaaaaagcaaagaagaaggtgactaacaaatgaaaaaaatgaaatggcaaaacgtttggttagtgcttatctttgtcttattgtacgcaccgattttctatttgattttctattcatttagcagtggggataatatgaatggcttcaaggcatttacctgggcaaattatcaggccttgtttgaagatactcggatgattgaaattgtgttacaaacgttattaatcgcgattctatcatctttatgtgcgacgattgtggggacgtttggggcgttagggatttattcaacgaagcaacggcgtgtgcgcaatatgattttatcgctgaacaatattttaatggtttcacccgatgtcattatcggggcaagttttttaattttcttcacgttcttaggttttggtttgggctttggttcagttttactgagccatatcgctttttcaattccgattgttgtcttgatggttttgccgaagttaaatgaaatgcggccagcattagttgatgcggcacgtgatttaggtgcgactgactggcaagtcctgagtaaagttattttaccgtacattagttccggcatttttgcaggctttttcatggcgttcacctattcgctagatgattttgccgtgaccttctttgtcactgggaacgggtttgaaacgctctccgttgaaatttactccagagcgcgtcaaggaattagtctagaaatcaacgcattatctgccttgatgtttgtcttctccttaatccttgtggccggctactatttattgaatcaaagaagccaagcccaaaaagcacggcgtaaacggaaagcgggggcttaaaatgaataaattaggacgcatcactttagcgattttagtggtctgtgcagccctttggtttgggacggttgaattacaaaaatcacaaggttatacgaaaaataatacattaacattatataactggggcgattatatcgacccagcacttattaaaaagtttgaaaagcaaactggttatcacgtttcggttgagacgtttgatagcaacgaagcgatgtacacgaagattaagcagggtgggactgcttacgatttagcggtgccaagtgagtacatgattgaaaagatgcgcaaagcacacttacttaaaccgattgatcatcgtcgcttaaccggctatcaaaatattggcaaggattttttgaatcaatcatttgatcctgggaataagtattcattgccttatttctggggcacactcgggattatctacaacgatcaattggttaaaaaaccactgacacattggtcagatctatggtcaccagattatcgcggccaaattatggtagtcgatagtgctcgggatatgatggccgtgggcttgatcgaaaatggccagtcagtcaatagcacgaatccggcggttttaaaggcggctaaggacaagcttgatcagatggcaccaaatgtcaaagcgattgtagctgacgaaattaagatgtatatggttcaaaatgaagcgagtgttgctgtgacttggtccggtgaagctgccgagatgttggataataatccccatttgcactatgtaattccagaagagggcagcaatctatggtttgataatctagtgattcccaagacggcaaaacatgaaaaggcggcctatgccttcttaaactttatgttagagcccaaaaacgcggctcaaaatgctgaatatattggttattcaacgcccaatataccggccaaagcactcttgccagcagcaacacggaataacccaggctattatccaagtcaaaaggtgatcgatcgcttgcaagtttatagtgatttatcaccaactgcggttggccgttataatgatttatttttagagtttaaaatgcaacattaaaagtacaatgagcagattgaaatggttcatggtataatagatacagaatttttttggatggaggttacctatgtcatttgaatggtcacagttattaacgtggcggatgctcgcaaatgtgctagacatcatcgttgtctggtattttgtgtataaattaatcatgttgattcgcggtaccaaagccgtccaattgtttaaaggtattatagtcattgcgctgattaaggttatcagttggtacattggtctacgaactgtttcgtacattatggatcaatttatcagctggattgtgattgcgttgatcgttatttttcaacccgaaattagacgtggtttggaacatatcggacgtggatcgctactacgacgcggcgttaatcccaaaattgaacaagaaaataatttaattaaagccctcgataagtcgattcagtatatgtcgaaacggcgtatcggggcgctgattacaattcaaatgaataccggtttggaagattatatcgaaactgggattgatttggatgcggatgtgacgggggagttattaattaacatctttatcccgaatacaccattgcatgatggggcggtcataattcgcgatgataagattgccgttgcggccgcttacctaccactttcagagagtaatttaattcccaaagaattagggaccagacatcgggcagccgttgggattagtgaagtaacggatgctttgacgattgttgtttctgaagaaaccggtggtgtcacattaacgcgcaataacgagttaatgcgtgatttaagccgtgatgattatatgaagtacttcaactcgcatttgattacccaagaggaaaacaaaacgagtctcttacaagaatttgttgatggcttcaaaaaaggaggccagaaatgatgaaaaagtttgttgaaggcccatggctctatcgaattttagcgttatttctagcgttgttactgtttggttatgtcaatttggatgaaattaacacgacgcgccagacgaataacaatgatacacagatgctagcaacccgcacggaaaccgtaaaagtgccgctccagattaatgcggatactggtcggtatttcattaccggctatccacaaaaggtcaaagtgaaattatccgggccgaatgcgctagtcacatcagcagttaacacattaaatttccgcgtgattggcgatttaacgaagctgggtcctggtgatcacaccgtcaagttaaaacagacggggattaataaagatatcaaagtcacgattgaacctaaagaaattaaggtccacattgagcacaaagtgacaaagcaattccctgtgcaggtcaatgttaagaaagaaaacttagcggccgggtatagtctaggaaatccaaaactaagtcaagacgtggttgaagtcagtggtgcaaaatcagcagtgaatgctgtgtcgcaagtagtagccactgttgatcccgatgaaggcaccaaaaaagacatcaatgaagaagtcttgttgcaagctgttgatcgcaatgggaaagcgttaaatgttttaatttcaccacaaaccgttaacgttaagatattggttcaaatgagtaagaaaacactcccgattagtttggaaaagaccggtgaaaaaagtggctacagctacagtctgtcatcaacaactgattcagtgaccgtgtatggtcgtcaaacagctttagccaagttgacgtcgttaccagtgagtgtcgatttatcgtcaatcacgagttcaacttcaaagacggttaaagtggctttaccagacaacatttatgagagtacgccaagtgccattaaggtgacaattacggtgactccagatacgaccaatacgagtgctactaatactgttgaagcgccgtctgaaagtacggcacaaacatcaagtagtgcgcccgttgagtcaagttcaagtaacagccaatcaagtagtcaatcaagctcaagtgaaggtagtaaagcaaataccaatgtaaatcaataatcaacgctaaagattttagcaggatgaatggagataattaaatatgacaaagtattttggaactgatggtgtacgtggcgttgccaacttagaattaagcccagaaatggcttttaaattaggacgtgcgggtggttacgttttgaccaagcacgctgataaggatcaacggccaaaggttttggtggctcgtgacacacgtatttcaggccaaatgttagaacaatctttgatttccggcttattatcagttgggattgaagtcttatcattaggcgtggtgacaacacctgcggttgcctatttaattaaggttcaagaagcaagtgccggcattatgatttcagcctcacataaccccgctatctataatgggattaaattcttcggcgcagatggttacaaattaccagacgcaactgaagaagaaattgaagcaattattgatgccgaagaagatactttaccacgtccagaaggcgctggtctggggacggtggaagaatatccagaaggtgctttgaagtatacccaattcttagaacacacgattcctgatgatttagctgggattaaagtggcattggatggcgcaaacggttcaaccagtggtttaattagccgcgtatttgctgatctagaaacagaatttacaacaacggcaacccatccagatggtttgaatatcaacgatggtgtcggttcaacacacccagaaaatgttgctaaaagagtgcttgaaacaggcgcacaagttggactagcatttgatggtgacggggatcggtgtatcgcagttgacgaattaggtaatattattgatggggacaagattatgttcattctcggtcaatatttatctgataagggtcgtttaaaacaagatacgattgtcacaactgttatgagtaatatcggcttgtataaagcgattgaagccaacaacatgcaatcagtccaaacagacgttggggatcgtcacgtcgttgaagaaatgcgtgaaaaaggctataaccttggtggcgaacaatcaggacacatcatcatctttgattaccacaatacaggtgatgggatgttaaccgggattcaactcttaaacgtcatgaaacaaactggtaagaagttatctgaattagcagcccctgttcaaacttacccacaaaaactcgttaacttaacagttaaggacaaggatgcttggttaacaaatgacaagatccaagctgccattgataccgttgaaaaagaaatgaatggtgatggccgcgtcttggttcgtccaagtgggacagaaccattgctacgagtaatgtgtgaagctgcaacagaagaaaaagtaaatcaatatgctgatcaaatcgcagcggttgttaaagctgaaattggcgcataattaaagggagtgctgacgcgagttggttaggctttgaggattaacagtaaaatgggggttatggtgtttcttgccataatccccattttgcagttcaccggaaatgactactcgagaagcgcgttcaagttggtcaacttttgagcactagcttgaaaagcacgttctcacttgaatcaaactaaaaaagcccgtcaacattgtgttgacgggtttttttggtgcaattttatttaagagcccattcttctaacgcaatgtgacttgttcgtacatcagaaaaccaaagacaaccaataagacaacagcagcggatatcagataccattctttgacaagtatgataggtgcatcagtcaaatgataatttttgcggtaacgtttgagattgaaaacactgacttcattcacgatgattaataaagcgggttctaatagtagcatgtatttactaccggttgaatcgacaatgttattggcggcaatatgtaaggcgattgttttaggtgcaacgacgataaagctcagtccgactaataggccaagaagagaaatacttcgaattaacaagatgctctttttcattacagaaactccttttctaaaattgactggtcttagtatagcataaaagcgctagatagcggaaaatatttggactataccaaaattataaatttatatataccaataaaaatgttgacattaaaatcgttggtgctattatatttaagtgttgtaccaattgattaaagaatattaaaccaaagttgaaaagaggatttttataatgtgtggaatcgtaggcgtaattggcaatgaaaagacaactgaaattttattaaacggattagagaagttggcgtatcgtggttacgattcagcgggcatttacgtgaacagcgaaactgggcaggactacttagttaaagaacccggtaaaattagcgttctagaagcagcggttgggcctgaagtacaaggaacaatcggtgttggtcatacgcgttgggcaacgcatggtgttgcgagtcgtgataatgcgcatccgcatgtttctgaagatggtcgtttttacttggttcacaacggcgtgttaactaactatttagctttaaaagaaacatacttggaggatgtccattttgtcagtcaaaccgatacggaagtcgctgttcagttgattgcttaccttgctaagacagaacaattatcagctaaggaagccttccggaaggctttaacgttgattgaaggctcatacgcatttgtcatggtcgatcgtgatgatcctgacaccttatacgttgctaagaataaatcgccattgttaatcggtgtaggtgatggctttaacgttgtgtgctcggatgcattagcgatgttgaatgaaacaaaagattttattgaaatccatgatcgtgaaatggtgacactcacgaaacaaagtgttcaaattgaagatttagacggcacttttattcaccgtgaaagctatcatgttgaaatggatgctgatgcagcgggcaagggcacatacccccactacatgttaaaagaaatcgacgaacaaccagctgttatgcggcgtttattgaacgaatacgtagctgctgatggagagcttaaaatcgactcagtgttactcagtgcaatgaatgatgcagattgcctctatatcgtggcggctgggacaagttatcatgccggtttaatcgggaagaccttgtttgaaacattaacgcacaagcctgtcgaagtacatgttgctagtgaattcggctatcacatgccgctattatctgaaaagccattctttatctttttaacacaaagtggcgaaactgctgatagtcgccaagtgttggtacaaactaatgccttacattatccaagcttgaccatcactaacagccaagggtcaacactttcacgggaagctgattacacattattattgcatgcaggcccagaaattgcggttgcttcaacgaaagcctacactgcacaaattgcagttgaattattcttggctgttgcgcttggacgccacaatcaactggtgctagcagaacaattcgatgtacatcatgaattaggcttagtcgctactggcatggaaactttattgagcgaaaaagaacagattgaaaccttgacgactgattacttacaaacaacacgcaataccttttatattggtcgtggtgaagattacgccttgagtttagaagctgctttgaagttaaaagaaatttcatacatccaagctgaaggatttgcagccggcgaattaaaacatggcaccatcgctttgattgaagaggggacacccgttattgcattcttaatggatgccaaaacgattgcgcacacgcgtggtaacttacaagaagtgactgcgcgtggggcaaaagccttgacgattgtcagcgaagaatctgctgaagcagatgatcagatcattttaccaaccgtaaacgacttattgacaccattattggggatcattcctggtcaattaattgcttactatgcaagtttgcatagagggtatgatgtagatcagccaagaaacctagctaagagtgtcacggttgaataaataatattcaaaaagcctcgttcaaagaacgaggctttttttgcgtttaatgagttggtgcatatgttgctcgaggaccgccaacgtattttggtcgtgaccgtaaagctgtgacatgtgcactacccaatgtatcaagggttgggcggacagggacttgaacgaatttcacgtgcatcccaatcgccgtatcaccgatatctaatccagcttgtgcaacgatatgttcaacttcaaccggatcactgaattgttcaaatgcagcgacggagcaggcgcctccagcgtgcatagcaggaacaactgagacaatttcaaagtcgtgtgcgcgggcaacctgacgttcaatcaccaaactacggttaatatgttcacagccttgcacggctaaatgaatccccaatggattgagaatgccacgaagtgttgcgatgatgacttcaccgacttctttgctagaagccttaccgatatgaccaccgacgacttcactcgttgaacacccgaggacgaacaaatcaccatttcctaagtgtgcttcgtttagaacatcctgagtcatctttgttaagtcttgttgaatttggtttaattgtaattcgtttgtcatttaaaaaatctcctagtggttaaataattgtggtcgaatacgggataaactagtgactaacgggatggtaaccacgataccaagtccattttgaacaatattactgaaaatcgaagcgattccggcagcccagccgaaaagtaaactggtagctaaaaagtaaccggcaaccatgacgatactaccgcaaatgagggggataatcagctgctttggtcgcattgaatcattacgagtcaggtgacctacaacgaagccttgccccccatgaatgatgagtgagaagagacaccactcagggtaaccagataatagatcgattaataggccactcagggctccgacagtgagtccgccaggatttcgcagcatgatcgccgttgtataaataccgacctcacagagcgtcacaaagcccttcgtcgccggaatcgggatgatgattaacaaagagagtgccacggtcaatgcggtgagcatcgcgagtaatggtaattgacgtttattaaagtgcatgtttagtagccccctgccagacattccccaggccatggcgtagatgaataccatcttttaaaccggcataaacaaatttctttgcgcgtgccacggcaacttcaatcgattttccttgtgctaattccgccgcaatcgctgccgaaagcgtacaaccggcgccatcaatggtagttgtttccaatcgtggagcttctaaataatgagttgttgcgcccgattttaataaatcaacggcctgctcaccagggaatcgttgaccacctttgataatgacgtgcttggggccaaatgattggataattgtagcagcttcgaccatttcctcacgcgtggtaattgacgaaagaccactgagttgttgggcctccaacaagtttggggtgacaacgctcgtcaaaggcagtagttctttttttaacgtgtcgaggtacgcttgctgcgcaagaatggcgccttctttaaagacgaggaccgggtcagcgatgatggttaattcaggatgctgtcgtagtcgctcacagatgccttttaaagtttccgtttgatgaaccaaaccaattttaacgtgcgttagtggcacgtagtttaaaatggcatcaagctggtccaaaatggtatcctcaggtaagttgtggattttcaagtgaccgtctggtagcaatgtagcgatgcaagttaaggcactgaccccaaacgtttctaaggcttcgaacgtttttaaatcggcctggatgccaccaccacccagagtatcagagccggcaatggttagaatgttttgcatagttgtcctccaaaattctattcttaactatcatagagaagaatagaatgttcaacaacagccaattggcttgtttttttaccatccaatttgtaaactaaataagaggtgttaaaaatgattgaatggttacaatatttacctgaacaaaagccaaagtatatggcaattaaaaaaatgattattagcttgatagataaaggacaattaagttcaggtgaccaattaccgccagagcgtcagttagctaaattattgagtgtcaatcgttcaacggtgacacgtgcgtctgatgaattggttgcagatggcgtgattgaacgtcgcgttggtagcgggacgtttgtcagccagcaagcgcgaccacaggcaaggcgggtcaattggcatacttatttgatcagccaacgtcagtcacaaagtcaaaatgaacggcgccaattacaacaactgattagacgaaaacctgaaaagttaattgatgtttattcaagtgacttaccattagaattagtcccacaatttcaatttcctgcattgacgtggcaagattttattactgcacaagcattagagacaccacgaggctatcaaccacttattacggcaattaatcaattggatcaacacaataaacggctattttttaccgaagagcagttattaatgactgccggtgtgcaacaatcactctttttaatattacagggtttattgacgccaggtgatgctgttgcaattgaatcaccctccttttttcatgactcaactttgtttgaagcgacgggtgtccgtgtctatgaagcttcagttgatgctgatgggatttatttgactgctttagaagagctaatcattaagcaccgtgttaagttggttattctcaatccagattatcaaaatccaacggggtacgtaatgagttttcaaaaaagaaaagcagttgttcatttatgccagatgcatcaaataccaatcgtagaagatgatgtctttggttggttaggatttgatacaactaggccaatcccaacgttaaagcaacttgatccggataatgttatttatattagttcgttgtccaaaattatgggggctagtagccgaatcgggtgggtagctgctactccgcaagtcatcgaacagttgacccgtgtgcaacatgaaatggatttagtgccaagcattatggcgcaagtcatggtgaccttagcgatgggggatccgcaatttcaaacgcagttggatcaacttaaggggacgcttcaagaacgtgcacaagcaacctataagatgcttgaaagggtattacccgattggcacgtttacttaccagcgggaggttattatatttgggtgacccatccgaaccataaattacgcttaaaaacctttattgatcatcagcttgctgtcgcaccaggatcattatttgggcttaaaacagatgcgttgcgcatcaattttgcgcgattaaatgcaattgatttggtcgtgctagaacaacgattagtagccattattaaagcaacagaataaagagggggattcggatgacagagcaattcgtaccagagatttatacaccattaaaaaccagtgttgtcggaccacctgctgtggcgcgacaagttggggggattaagatcctcggtaagaagattaaaacaattatttttaccaccgatgttgcgattgtgaataatacaaatgctgacgctgttttggcagtttatccatttacaccacacccagctgtcatgaatgccatcagcaatgtggcgacgatccccgtttttaatgggattggtgggggcttaacggccggcagccggtccgcgtacatgggattattggcagaggccgccggttcgattggcgtggtggttaacgcaccgacctcggtggagacgattaaaatgattaaccgcgttgttgacgttccgattatttgtactgttgtgtcagaacgacaggattacgccgcgcagattgaagctggagtttcaattttaaacgttagtggcgcggctaaaaccccagcaattgttagtgcaattcgccaacaatatcccgaaattccgattatggcaactgggggtaaaaacgaagctagtatattagcgacgattgaagcgggtgcgaatgcattgacgtacacgccaccgaccaatggtgagttatttgctaagaaaatggccgactaccggtctgatttagcatgataacagttgacgtgctatgcaatcctccgtatgataaaaagattactagaggaggtctttgaatgattcgtcaagcaacagttgcagatgccaagagtgtcttaccaatcattaacattgtttttgaagaaatggaaatgccactcttccaaaagattccgttggaggatttatttggtattttagaacaggcctttgcaatgcctgaatatcggtatagttatgctaacacactagtttatgaagaagacggccaagtattggggattgttgtaggcttcccagaagaaaaggaagcccatatcgacgatgcattagcaccgttattcccacaaatcggcttacctgagacaacgcgtttctttaccgataaggaagcacaaccgggggaatggtatttagatacacttgccgtcgctgaacatgcacaggggcatggtgtagggacaaagttacttaaggccttaccagattatttaaaagcacgtggtgaaaaaaagattagcttaagtgtggatttacaaaatcctggcgctaaaaaactttatgaacgaatgggttttgttaaacaaggagatttaatgattggtgatcatcaatatgatcatatgattaaacagctttaacacgaaaagagccgacaacaattgttgtcggctcttttcagattaaagtaatggcataatcattgtcgtccatagccagctcagtggcatgactaagatcattgctggtatcatgtctgcaattggaaattcgcgaattttagcaattctaaagccagtggcgagcatcaagaggccgccgcaagctttgaaatctgcaagcattgttggattcgttagtgggaaaatgagtttggcaagtaagaaaatgatgtaaaagataatgaattgcggaatcgcaatggttgaaacgacggggccaagattgcaggcaaagatggcagcagtaaagaaatctagaattgatttagaaattagaatcgtattgttgcctgtcataccagcatctaatgtcccataaataccggtcccaccggcacaaaagaggacaatcactgtcacgagtgctgaaataaattcggtatctgatagcgtattgtttttacgcggaaaaatttagaaattggccgttccatcaagacggcaccgcgatcaatccagcgaccgaagtgaatgagtaggccaatcccagtaccgagaacaactgcgaagatgactgcaggcatgttcttcatttgaataatggcattgatgcccattcccatcgaagcaacaccgaagattaaggtgagttctgttttaaatttagttgataatttatctcccaataaactaccgaatagaccgccaaataagacggataatgaattaataatcacgccagttggcattgagaagacccctttaattttaagtttgcatattcaaccataccaatttaaaagaaaagaatcaatttaattttaaatgttagcgcttatatatattcgatgggagtcttgagctagaccaaaaaacgactaatcatttgattagtcgtttttttactgactattcgaatcgcaaactaggcttaaaacgccgaatcagtgccttgggttggttataggcccaatgatttaaaacggcggcaatcaaaatacaggggacgatatccttttcttggttgacagtcaattgaaaggctggaccgctgcttgctagaatggtggtcgcttgcatgatgggttgtgtatggtagataatgcgatattgattttgcgttaaatctcccataattaaccaattaagttgtttgacatagataaactcatgccagacgccccagatctttttgagttgaccaatccgttcatcgttttggaaaaggtcaaagtcaggtgaggggctaattgtgacttggcgaatttcaccgagtaagtcgccggtgagtgagtaaaggctgaatacgtcatgccgaatcccacgctttccaataagtaaataacgcggttgttcttgatcgtcaatcacggttgagacaccacgtgaagcactagcctggtgtttaatgtagaaaataggcatcaaagatcacttcttttcagctgtacgattcaagtcaatcgcgtgataaatcgcttgtgcgacgccgtcttgaatgttagttgcagtttgatagttcgcaagttccttaattgttgggacagcattgcccatggcgacaccaatgccagctgttttgatcattgaaaaatcgtttaagttatcaccaattgccattgtttgctcaactggaatccctctttgttcagcataggcggccaaagcgatgcctttttgagcgtcaatgtggtttatttcgatgttattacttgaagaggaagttacaactaaatccccgcgggcttcacaaaatgccttaattggtgctaattcggtcattccctgtgtgctaaaagcgatgattttaagaatcttaaccgttggatcgttaataatcccttgatagtgatcatcgacgtagttaatattcattaattccaaacgggctgctgctaaagcaaccgcaattttataactcgtatcgggattgaggttgacgagtaaatcagcgacattttggatgcgactgactttgctatctgaataattaccggcagtcgtcatgagttcgaagtaaatattattttcgcgtaaattttctgtgacggctgtcaccgtttcggaatcaatcggcacattcaaaacttcattacctaaagaatcaaaaatttgggcaccattcatcgtaattaaagtaggttggatgtcatcactgtcaattagggggagggcttcagaacgactgcggccggtagccaccacgaattcgatgccggcgtcttgggcagctttaatggcggtcatgttaccgtctgaaacctgcattttgtcgtttaataaggtaccgtccatatcagatgcaataattgaaatcaaaggaattcctcctgaaaacgtattattagaaacttacctctatcttagcatgcaagctacttttcttctagcaacttatgttaaaacacgataaactagttaatgaggtgagcagatgaaaacaattattcacaatgagtggcaaacgattctcgcaccagagtttgccaaaccctattatggtcagctccatacctttttgaaacaggaataccaaacgaccacggtttatccagagatgcaccatattttccaagcctttgaatggacaccgtttgaacaggttaaagtcgtcattttaggacaagatccttatcatggcccgaaccaagcccatgggtgtagtttttccgttttaccaggggtcaaagtcccaccatcattgcaaaatatttataaagaattgcagacggatgttggctttcaaccggttcagcatggctatttaaagagttgggcggatcaaggcgtgttcttgttgaacaccgtattgaccgtgcgggcaggtcaatcaaattcgcatcgtaaacaaggttgggaacagctaacggatgcggcgattgctgcattgtcaaatcggggacatgtggtcttcattttatggggaaacgcggcaaaggataaacggcggttaattgatgagacgcaaaatgcggtcattactgcagtacatcccagtcccttgtcagcctatcacggtttctttggctctaaacctttctcacagacgaatactgcccttgagcaatggggcatggggccaattaattggcaattaccacaaacagtcacggtagaataatgaagcgttaccattgttgacttgtcgcggtattagaaacgttgtatgattacattagcaataataaaatgcttactggaggttgcaattgtggatttatttgaaagcttaaaagcaaagattaccaatcggcaatttaaaattgtttttccggaaggaacagaaccaagaattattggtgcagcagcacggttgaatgctgatcggattttgaaacccattttaattggggcaacgaatgatattcaacaaatcgctgctgctaaaggatttaacttggacgggataacgattattgatccacaagaatatccaacagctgactttgaaaaaatggttgccgcttttgtcgaacgccgcaagggcaaggcaacccctgaacaagcacaaacaattttacaagatcctaattattttggcaccatgctggtttatttaaacttagccgacgggatggtttcaggtgccgtgcattcaacaggcgatactgttcgaccagcattacaaattattaaaacaaaaccaggtgtccaacgcacaagcggggccttcattatgcaacgcggtcgcgataacgaacgttacttattctcagattgcgccatcaatattaacccgaatgcgcaagaattggctgaagttgctgtggaatctgcaaagacggctgagttgttcgatatcgatccgaaagttgcgctgttgagcttttcaacgatggggtctgcgaaagcagacgaagtcacgaaggttcaagaagcagcacggattgcacatgaaattgcgccagaattagacattgatggtgacctacaatttgatgccgcatacgtaccagttgttgcgaaccaaaaagcaccagattcaaaagtggcgggtcaagccactgtgtttgttttcccagaattacaatcagggaacattggctacaagattgcccaacgttttgggaatttcgaagccatcggaccaattttacaaggtttgaatcaacccatttctgatttatcacgtgggagcaacgaagaagatgtttacaagttagccatcattacggctgctcaagcattacaaaactaattgaccgacaacaaagacgccagcacagaaaaattgtgctggcgtctttgactttgcgaacagggcttttttcggtataatgacacacagataacaattagaatgaggcagaacatgttagaatttaaaacaactgatccagaacaaacaattgcgattgccaaacagttgggccaacaagtccaagccggtgatgtcttgttgttggatggtgatttaggcgctggtaaaacaacgtttacgaaaggcttggcagctggtctgggaattgaccgctatattaagagtccgacatttacgttaattcgtgagtatcaagacggtcggttaccactctatcatatggatgtgtatcgattggaagaaacgggcgccagtgatttaggcttagaagagtatttcgatggggacggggtttcggtggttgaatggagtcaatttattgctgaagaactaccgagcgattatttgacgattcattttaataaggatgttagcgatgatcaagttcggacgttagtacttgatccgcacggcgctcactacgaagcattggtgcgtactagttttgcagactagtgtaattgacattcggcccgcgcaagcagcagatgcgcgggcttatttatgctttctaaaggcggtcgctaaagaaacacggtatgttgcgttaccagcggagttagccactttaacaccattatttactgaatttttgatagcaagtattcttgaatcgcaacaagatgtattattgcttgcttttgatcaacagcaaattgtcggggcaattcgtgtgaatagtccgacagaacaggggctaacacatatcagtgaagttagtatcgctgttttaaaagcgaagtggcatcgcggaattggctctgatttgatggcgcaccttttagcgtcggttcgagaaataggaaatccgcgacggcttgagttaacagtacaagcccgtaatcaccgtgcaattgcactttacaaacggtttggttttgtgaccgaagcacaattagcagccggattttatgcgccagaaacgggctatattccggttgtgcaaatgtgccaattaatgaatatggatgaggagatttaagatgcaacaacaacgaggacgcggaatttacttagccgtattaggatcaatattttgggggattcaagggccagtatcacagtggctattcactgacacggcaattaagccagaatggctaatgggggttaagatggggctttcaggcctatttctattaggttatgcgctcattaaacaaccgaacgatgtttttacagtgtggcggcaaccgcgggactttacgcggatgttattatttgcagtattagggttatcggccgttcagtatttttattttctaacgattcaagccagcaatgcaccaacgactacgattttacaacagctaggcaccatcatgatcatcttaattagcttggtgatttatcgtagagcacctagccgcgttgaactaattgcagtgactgttgcattgttggggacgtggttgttagtgacaaaaggacaactgacacatttggcgatttcacacgcggcattcggacttagtttatgccttggcttttctggcgctttaaacacattaattccggttaagttattccaaaaatatccaacattagtgattgtgggctgggcgatgttaatcggtggggtggtcttcacatttgttcatccattttgggtcggtgttccaccgttgaatgtggcaacaatcagcagtgtcttattcattgctttgtttgggaccgcgctcgccaatctttgtttcttggggagtttacggtatatcacaccgacaacggctggtttattgaatacctttgaaccattagctgcgactatcggtactgttttattcttgaaaacgagtttcaacacctgggaagtcgtgggtgggattctcgtgatcagtacggtgtttatcttgagtcttggtcaatctaagtcaaaataagttaacacgatgaaccgaattgtggtataattaacagcgaaacaaagctcgtacattagtcaaaacaaattaatgattatgatgaagttgttaatcttgtcgaagccctaatgacaatttagctttaatccaccattcgctaaaagagcggttagcctgtctgcatagacaagttaaccgctctttttttgttagccgattaatttggtggccgcttttagcggttcaacgccaaaatcgttggcttctttaatcagaatcttggcacaagcgatactatcagccagtgcattgtggtgattgtcgagtggaatcgctaggttatcacacaaggtgtttaacttatgattctcaaattgcggatacaaccgccgactcgtcttgagagtatccaacgctaaataatggggttctggaatgtcgtagtgttggagtgtacttttcaacacaccaatatcaaaattcgcattgtgggcgaccactaacttgtttggcgtgaaaaatggtgcgatgtgcggccagacttgattgaacttgggcgcttgagccacatcggcttcatgaatgccatgaatttgcgtattgcgactgctaaaataagtttcaggtttaattaacgtataaaaactatcaacgatttgatcgttgcgcacaacaacaagggcaagtgagcaagcactatgccattgaccgttggcggtttcaaaatccattgcgacaaaattcattattttgaacctcgctttttataaagtttgcttattctaagcgaataaatcttgcgtgtcaagttcgacggggcagtggtcggaaccaaaaatttccgtgtgaatcttggcatcgactaatttaggttggagatcattggaagtaatgaaataatcaatgcgccagccggcattattgtcgcgggcgtggaatcgataactccaccaagaataaatatcgggttgatcaggatagaaataacggaaggtatcggtgaagccgcgatttaagagggttgtcatttgccctcgttcttcatctgaaaagccggcgttatgatgattggtcttatcatttttcagatcaattggttcatgggcaacgtttaaatcaccgcagaaaatgacgggtttttgagtcgataaattagcgatataagtttgaaaggtattctcccaacgcatgcgatagtctaatcgtttcaacttatcctgtgaattgggtgtgtagcaagtgattaaataaaaagtagggtattcaagtgtaatcacgcgtccttcttgatcgtgttcaggttggccgataccataagttgcagtgagcggtttatgcttagtgaagatggcagtaccggaatagccctttttttcagcgtaattaaagtattgatgataacctggtaaatctaattcaacttggccggcttgcatcttagtttcttgcagacagaaaaaatcggcatctagttgattaaaagtgatcataaagtctttttttaaaacggcgcgtaagccattaacgttccaagaaataaatttcattgtcgattcctcatttctaaattccattttaacggtctagtcaataatacgcaaaaaaagtgttggctgttcaattcaagccgtctttgttaaactaggagtagattattttttgaggggaacgacaattgtgacaagtcaagttgaagtatttttacaagcaaaccaagcaatcgagattcatcaagcagaaccattgagcttatacacctttaccaaaacaggtggaccggcagatttactcgcactccccaaatctgttgcagaagtgcggcaattagtggccagtgccaatgaactgacattacccatcacaattatcggtaatgctagtaatctaattgttcgtgacggtggcattaaaggcttagtcatcatcttaacggcgatgaatcagattaaagttgaaggtaacttggtgactgcgcaagctggagcagggattattcaaacctctgaagcagcttatagcggtagtttgaccggcttagaatttgctgccggcattcctggtagtgttggcggtgcggtctttatgaacgccggcgcatatggtggcgaaattagtgatgtactgacccgcgttgatgttttaatgcgcgataatcaagtacagacgttaacggccgctgacttagacttcagttaccggcatagtttaattcaagataacggcagtattgtgttggttgcctattttgaaatggcaacgggtgcggcaccaacaattcgcgcccggatggatgaggtcaacgctttgcgggctgccaaacagccgctagaatatccctcatgtgggagtgtctttaaacgaccagtcggtcattttgtcggaccgttgattcaaaaagcgggcttgcaagggcatcaaattgggggcgcacaagtttctaaaaaacatgccgggttcatcgtgaatattgatcacgcaacggcaacggattatttgacgttgatcgaatacattcaaaaaacgatctgggcgaagtttaatgtgcgcttagaaccagaagtccggattattgggcaacataagcaaggttaaatcaatgatgaaaagctatggtaaaagatgattttatcagggcttttttatcaggatgagcgttttaaaaagaaagggtgttgggatggcaattattgaagctgttattttgttaattacgttggtgattattgccaatatcatcgggcattatttgccaaatttaccggttagtttaattgagatcgggttgggattaatggtggcgttagtatttgccgtcaagattccactaaaaacagattggttcatgttggtgtttgttgcaccattattgtttaacgatggccgtcgttttcctaagaaggaactatgggcgttgcgcggaccaattattgggaatgcgattttcctcgtctttgcaacgacgttaattggcggcttggccattcattggttagtcccggcgttaccgctggctgcaagttttgcgttagcggcaatcttgtcgccaacggatccggtggcggtacaatcgatttcagaacaggccgatttaccgccccgggttttgcacttagtgagtggtgaaagtttaattaacgatgccagtggcttgattagctttaaatatgggattgctgccgctgttaccggctatttctcatggcaacaagccgcgggcgattttctgtatattagtattgttggcgcactagcggggatgattatcatgttaatcattcattttattcgcctatttatgctacaagaaggctttgaagatgtgatgttccatacgattttacagttggtgacaccgtttatcatctatctaattgttgaagatctattccacgcatccggtgtgattgcggtggtggtagctgggatcatcagtcattcatcacggaatatcttcctcgattttttaccggagttgaagttagtgaccgaacaaacttggtcaatcagtgtttacttattaaacgggattgtctttttaattttagggattgaattacctgtcgctatgcataataccgtgcataatccgctgattaatacgagtgaagaaattctcctcgtcttagcggtttggttgattctggtgattgtgcggggactctggacactagcttacttgctctacaccaaccagacgaatcccaaaacattccgcgaaaacattaaaattgcagtgctctctggactttctggggttcgtggagcgattacgatggccggggtattatcggtgccaactgttttagcggatggttcaccgtttcctcaacgcggcttaatgctctttattgcggccggcgtgattattgtcagtctggtgatggccgttgtcttaattcctaagctgacaaaagtcaaagcaccaatcgagatgcgagggatgcaacgagatcttgaagccgaagcagccgcagaagatgaagcagctgctgatttattggatgaaacaaacgctaagatttacatgtacaaagtagcagcgagcatggtcgaatcccaacggcatattgataataaccgggctgctttagatttattggcagagtatcagttgatgatccgccggttggagagtcaacaaagcgaagcaagcacaagtgacgaactaccaccgttaattgctgaagagttgattttgcgacaagtggcatttgacggagaacgtcagaagttagagttattatgggctgaaaaggccattagtgctaaaagctatcggcatggtaaacgtaagttacggcaaaaacaagtaatgttatcggttattgggacgagttttaattggcatcatgtgcaactacaagtctatcgtgcttggtcaatcagcaaacgctttttgacgcatctctggccgcggcataccaaatcaccaagtgaaaccgagtggcaattgactgaacgtgaaatggctaaggcgggaattaaacaattgtcgtatttcctaaaacagcctgaaaatcgccaacgtcattataatcgtcaggttatttatcaaattattgtgcggtatcggaatcagattgaaaacatgaaaaatggggggcggagtaagactgctatctatgaacgtcaattacaaaaattaagaatcaaagcgctcacgagtgaacgagtggcgattcaagagttattggaacaacataaaatttcatggcaacttgcagatgaattacgcaaaaacattaactattccgaaaatacactgatcttagcacgaacggatactgaatagattcaaaaaagccccacgcactcattttaaattgagtgcgtggggctttttttgatggttagaataagtggcggcggcggtagtatttgtagctgtaataaccaccaattgcaaagccggcgctgattagtgaaatcgtcaaaccccaatagaaataaggtggccagtatttaagggtaacggtatggtgaccttttttcagcgggatggcgatgaagttcttcaagccgcgtttgattttaaccggatggccgtcaaccgttgcatgccaaccagcagcataggggacggttgtcatgaggacttggttttgttgaggaatggtgatcgttcctttgatggttgtgtttgagaaagtattcagtttcaatgcatgtgcacgaagttgctgcgttaggtgcgtcaatgcttgataattcaaactatataaattaatattttggagccaaatttcctttttagagaagctaaggtcaacggtttgttgttggccgattgcgttacttgtcaggtttaagacgacagtatcgcggaaagtatcgtattgttgtagcgtgtgaccgtttaatgagacctgaaccgcatttttttcgaggtttgagcctaatgtgaggtaataggggtcactcgttgtgggtgtgaaggtatagatgacgtgagctggattcttcggatcaacccggaggaaagtttcgttgagttttggtttttgtttagcattcttgtaagtgacagtattgaaaaattgaagtgtgaagagtggctgttctgtcgctgaattgactaagtctgccgcaatctggttctgttcaaggatgggataattggcaaccacatgatgtttaagcactttttcagaggccgcaaagcctaaatcaagtgcgttggggttttgataaattgcaatttgatctttttttttgagtaagttataacgtgctaagtccggcttattcgtactgagtggaattgttgcttgcccactagtattgttaaggtagtagcgataacctaataacgcatcggtgaacagggtctgattagtatcggcaacggcgccatcgccagctggttcgccaatgctgcccatgaatttcggatagctcagttcgagcatcgaattaaaatgagatccgccgaaataatcagcttgcatcgggtcattttttgtccgcataaaggttttgccaattcgttgaaacgcggttttatttggaattgcgctaatggctgattgtaaatgagctgtataatctgcgtaatctttttgtgagacatagctaatttgattaagactcattgtcgcgttggtgaccatctcaccaccgacgcatagaactaagagcaaaggataatagtgcttgagcggctttttcaggagtaaaagcaagcatgtcatcagtaagaaagcgatgcttaagttaatctgattaggacttagcgcggtgaagctcttgagatgtttggcagtataaccaaaagccgccatcaacattaaaaacggcaacaagagttgataccaactaaatcgaaggtgctggtggagccgttgaaccgcgagcacgattagccaaaagctaaccacatatgaaaagcggtaaggataccaaaccggaaattgcatgccgtgccataataaatcaaggggttcataacacattgaaacacctaagaaaatggtgactaataaggcaactaaccgttcttgccaggcaatcttgcgtgttccaaaatacaagatggcacaaatcaatacgagactgccgacgaatatattcggttcgccttttggcatttggtcgaagttaaaattgccaatcacaagtttagaaagcatcttaagcggattatattcgaacttccaatgaatcttttgaatggtgtactgccctttgctctgcgtcaattggaaaaaagttggcaataggagccaggctgagagtaaaccggccaagagtgagccactgatgaagcgggcagcgctttgccatagatggcgccaagtttgccaataatgagcacaagcccacgcaaaataagcaatgacaaacaggcaaaccatatagcccatataatagttactcattaagagtgcggcaagactcaatggataaagccaaaagtgacggcctgtaaagagccggtcgatgcctaagacaactagtggaagccagacgagtgcatccaaccacataacgttaaactggttggcaattgcaaacccggataaggcgtagacaacactaagtgtcggtaaccaccagctatggagtagtttgttagattttaagtagtacgcaaagctaagaccactggcgcctgttttgaaaaggacaagcagccaaacaccaaaactcaaccaagttcctggtgtcaataggacgattagattgaatggactcatcaaatagtaagcccagaccccaagcatgtcgccccctaagcccttagcaaaggaataaaaaaaagtttcgggatggtgcaatagcgtacttctgaaaaaagcgtaaaaatcgatgtattgttggcctagatcaacagtcaggattgtttgccctccaaaagggaacacttgtcgaagtagtccgtagataaataaaatgccaaatggtagtaagaaactaaggcctaatgtataatgacgacgtgcaaaagcgtaaaatcgactcacggtaatcctccaattaataaaaaaatctaaaaattaggttgctagtccgtttttaactgagaaaagctgtaaaatataaccagttaatgactatgcttaagcataccataatctcgtttgaatttagagatttggcatagcttgtttaagataattttgctaaacttaaacaatacagcacaaaatcgctcaaaaggtcgcttggcgactttttgaagcatagagcggcgccatcttttactagagcggcgctaaataaggagtatctgaccgtctgtgaaaatcattaagagaaaaaacaaacaaaatcgtgaaaaatcactgattccattccgcttaaatttcctattattcgttgtcttcgcgttatttgccgcgttgattatgcaattgggacgcctgcaagtgatggagggcgctaattttcaagcgatggtcaacagtactgataagaaaatcgttacaggtaacgtgcctcgagggatgattctggattcaaagggccgtgtcttagttgggaatactgctaaaccggcgattacttatacgaagaatatgaatgtcttggcagacaaaatgtatgcagagggcaataagttaacccaatatttaacggtcccgacggataagttaactgaacgtgatcagattgattactacctcagtaaccccaagaatcttaaaaaatggaacgcaaaactgcctaaatctgcgaaggttgccagtgatggttctgagttgccagaaaagaaggtttatcaatcaacaatcgaattggttaaaaagtcgtttaaagggttaaacgagcaacaaaaacaagccgctgcgattttcaaaattatgagtggggcttatcaattatcgacagtttatattaaaaatacggatgtgactgataaggaaattgctgaaatcagtgaacatctaacgagtttgccggggattaatgtcagcaccgattgggaacgggcttatcctaatggcgattcaatgcgcagtattattgggcatgtttcaactgaagagcaagggttaccagaagatggcgttaactccttgctagcacagggctattcgcgtaatgatcgcgttgggaccagttatttagaaaagcaatacgaaagtgtcttgcatggttctaagtcgcaatcacaagttgaagttggtgcgaataatcagattctctcaagtaatgtcttatttaaagggcaaaaagggagtaatttaaatttaacaattgaccaagcttatcaaacgcaagtggaagcggctttgaagaaagtctatgatcaggcaaaagcagcgggagccactcagtattctgatggtgcctatgccgtggcgatgaatccgaaaacaggtgctattttagcaatggctggcgaatccaacgatcgtaagtcaggtgaaattgccgatgatgcgctcggggtgattaatcacaccttcgtcatggggtctgctattaaaggggcgaccgttatggggggcttaatggatggtgtgattacgccaaccaataataccttaccggatacaccaatctatttaagaggaacgccggttaagaaatctgtttacccagttgggacgtttggatcattgaacgctgaatcagcgttggaagtttcttctaatatttacatgatgcaattagcgatgttagaagggcatgccaaatatgtacccaattcttcgttaacgatggattcagatatctttacgaagatgcgtggctacttcagtcaatttggcttaggacaaaagactgggattgatttgccaggtgaagccaccgggatcgaagggccaaccgtcaatgaatatggcgagccagccaatggttcattacttgatttatcttatggtaactacgatgcctacaccttaattcaattggcacaatacatttcaaccatcgcaaacggtggtcaacgaatgaaaccataccttgtggattcgattcaacaaactggtaacgatgggtcagctggccaagttggtaccaagaccacgccgacagtgcttagcacagttgatgcgcccgaaagttactttaatgtcgttaaaaaagggatgtacaacgttgtcaatgggaccaacgcttgggggacagcacacaccttgaaagatattaaaccaacgcttggcgctaaaaccgggacggcacaatcatttgcccgtgaagatccaaacgattcgacaagtaagcaagtcgaaaccgttacttctagtttggttggctttgctccatacgataatccgcaagtggcaatcgccattgtgttcccgaacttaaactctgataaagggcactacaatacgttactagcccgtgaaatgattacgagtttctataaattaaataacattactgaatgaaatattccaaaataaccttttcagataccataaaaaatggtatgatactaagagtctaagaattaaacagttttttagaaatttacttacagcttggaggctatatcaatgcgtgttcacattacaatggaatgtacagaatgtcacgaacgtagttacttatcaaacaaaaataaacgtaacaatccagatcgcttggaattaaagaaatattgcccacgcgaacgcaaagtaactttacaccgcgaaactaaataatagtgacgcacatcaaaagtcggggcgcttcgcgctcgggctttttttgttaaggaggcttttgaatgcggactaaaaagcaaattcggcaacaacaaattgcggcattacaaacgcttgcgcagacgcctgcgcttaaacatgcccaagaagcacaacttttggaattgttaatggcaaccgaggtgtttcaaaaggcaacaatcatcggtgtcacgttgagtcagccaattgaaatggcgacccagccggtaattgatgccattcgtttggccggtaaagaagttgtagtgcccaagacattgccagagcgacaaatggctttttacccgttaacggcaaccactgaattaacaacgagttcctatggtgctttagaaccagtggttacagctgggagccaggtgttaatccctgatttaatgattgtgccgggactagcatttagtccagaaggttggcgggttggttttggtggcggttattatgatcgttatctcgccaaatatccaatgccaactgttgcactagcgcttaaaccacaacaacgaagtgctgattgggccattgatgaattcgatatccaactcgatcaggttcttcaggtctaaaggagaaaagatgactaattttaaagaacgttggcaagacgcaccgattgtggtgtatgccttgatggtactaacgattttgatgtttgcaatgatgtttttgaatccggttgtatggttgaacggctttacatcggttaacatgctaatgaatggccggattattgggtttatgatggcatctgtcaatcatggccggtttatgaatctcttcgtagatttggttattttgttttttgttggtggacaacttgaacgattattaggacactggcgcctattagctatctatatactgagcagtttggcgagtttgtttacaacgggcgctttttttggtctcgatacaccaaccgtgactgctggaacagctatcttagggctattcggtggcttcttgatgttaggtgatgcctttaaagaagaatccgtgctaggacaagtggcacgccagtattggctgtttttatttttaacaatcggattacaatttattgtcgatcacaatgcattgtacgcaatggtaggtggggtacttggcggctttttaagtagtatggcgctgggtgcacctaaagtgggtaagattaacccgctgaaccgtgtggtgagtgggttaatttatgttgcaacgatgattttatttggttttctgggtatgaatcattaatcaatttatgtataatgttaaaggtgaagttgatgagaactctatatgatgtacaacaacttttaaaacaatttggcgtttacgtccatcttggtaaacgactttgggatatcgagctcaccagtatcgaattacggcacgtttatgatgcggggttaatcgatggcaaagtgtatcgtgatgctaagatggttttagtgcgtgaacatcggttggagaaaaatgaagcgtttaatcacaatttattggaggagaagtttaaatgacagacaagaagttaatcggcgttgatttaggcgggacaactgctaaatttgcaattatgacaatggatggcgaaatccaacaacgctggagtatcgatacggatattttagatgaaggtagccacattacaccggatatcattgaatcgattaatcatcatttagatttatataacatgacacctgctgatttcatcgggattggtatgggcacacctggtagtgttaacagtaaagaagggaccgttattggtgcttacaacttaaactggaagacaacccaatacttacgtcgcgatatcgaagctggcacacacatgaagcttgcaattgataacgatgccaacgttgctgctttaggtgaacgttggaagggtgctggtgaaaaccaacccgatgttgcttttgtcacacttggcactggagttggcggcgggatcgttgctgatggccatttattacacggtgttgctggttctgcaggtgaattaggccacgtaacagttgaaccacatggttatgaatgtacgtgtggcaaacaaggttgtttagaaacttatgcttcagcaaccggtgttgtgcgcgttgcacgtgacatggctgaagaatacgctggtaattcaaaattaaagacaatgttggatgatggtgaagaaatcagctctaaattagtttttgacatggctaaagaatcagatgcattggctgttaaggttgttgatcgtgtttcttactaccttggtttagcattagctaacgttgggaacatgttgaatcccgcttacatcgttatcggtggtggtgtttcagctgctggggaatttttacgtaaacaagttgaagcttactttgaagaatttacattcccaaatgttaaaaatacgactaagattcgtttagcaaacttaggaaacgtagccggtgttatcggggctgcttcacttgcacttcaatttgatcaacaataatttgttataagggagtcttatcgatgcttgtattagggacaattaatgtatgggtagtaattaatattattctgatcgccattttactttggttcttgggcgattgggcatattatcaaattcaacgcaaacgcttaggcggcgaattaacggaagcggcgtttgaagaaacaatgcgcaaggcccaaattgtcgacttacgggataaaaaagattttgatgcaggccacattttaggcgcccgcaacttaccttatccaatgttgaaacaaaatatgggtgaactacggatggacttaccagtctacttatatgatgcaggcattacgctcagtatccgagcagcactgaagttaagaaaagccggtttcaccgacattaaatggttgaaaaagggttatgctggttggaccggcaaaacaaagcgtaaaaagaaattaaattaaaccaaaaaagcccaagagttactagcgaaaaaaactagtcaactgttgggctttttatagagtgcgcaggcagatggtcatactctgaggattagtggcataccgtaaatgagcggcagagccgatcgtttgcggtatgtaactaaccgaaagagtatatctggcggcgcacgtttcaaaacagagtgcgtttaaagcggtttgactctgagcattagcatagtattgttaatgaccgacaaagtcggtcgtttgcaatacgaagctaatcccaagagtcagctttaaaaagcacgtttccacaaaaaaagtccgtcgccaatcaggcaacggacgcagtcttttcaaagcgcttagccttggtgagctgaatggctcttacggttagcacgtcgacgactttcttcaatttgattttctttttcttcgattggatcaacgacggtcttcttaaatgccaagagtgaaccggcaatcgcgccgactgttgaaacggttccgattacgaaaccttttagaaatttatgtttcataggtaaagcctcctcaagtctcaattcattcaagtacaactttattatcgcgtatttaagcgcgaatagctagtaaaatacgttaattaatgtggtgaaaatatggaaaaagaaaagctaatcgtcattgttggtccgacaggcgttggtaaaacagcgttaagtctacaactcgcacaacagttgcaaggtgagattatttccggggatgcgatgcaggtttatcgccagttagacatcggtacggccaaagtcacaccaaaagagcaggcgcttgcgccgcaccacttaattgatgtggcggatatcgatcaacgcttcactgcctttgactttcaacagcaaggacaacaactcgtcactgaaatcgtcggccggcaacacatgcccttggttgttggtggaacgggactttatttgcaggcgttactgtacgatatgaccctgggtagtgcgcaagatgcggaacagaattttacgattcgtcaaaaatggcaaacttttttggatcagcattctgaagaagctttgtggcagacgcttaatcaaattgatccgcaagcagccgctaaaattccgagtgcgaatccacggcgtgtggttcgcgcattagaggtttatgaaacaacgggaactttgttttcacaacaaaagccaaaagaattacgttatgatacgtttattattggattgaattgtgaccgtgcattattatacgagcgaatcaaccagcgggtggatcaaatgatcgatgctggacttttagaagaagcgcggttggcttatgcacatcgtgaaacgagtccgcaagccgtgcgggggattgggtataaagagttcttcccatactttgatagtgactgttcattagacgtggcaattgctcaagtaaaacaaaattcacggcactacgcaaaacgacaactaacgtggtttagaaaccagattccggtcaattggtataatctggttgaacaacctgaagccgatttggctcggattcaaaccgatttacaacaatggttacagcaataatagaaatggagtggttaaaaaatggattggcaagcaaacttagcaccagaattacaagctaaaatcgcggcagttgatacgcaaatcgcaccgcgtttacaagcactggatgaacaaatcatcaataatcaagcaaaggtgctcgaagcgtttcaagcagaaaatatttctgaatcgcatttaaacgggacaaccggttacggcaacgatgatcaaggacgcgataagttagaggccgtctatagtcacgttttcaaaactgaagatgcgcttgtgcggccgcaattggtttccggcacacacgcgattggaacggccttattggggatgttgcggcctggcgatgatcttttatatcttacgggcgaaccatatgatacgttgcaagaagtcatcgggatggccggtaacgggattggttcactaaaagaattccaaattggattcgattttgtgccattattagctgatggtgccgtggattttgaaacggcccggaccaaaattacagctaagacaaaagtggtcgctatccaacgttcacgtggctatgctgatcgcgatagtttcacggttgataaaatcaaggaaatgattgcctttgtcaaaaacattaaccctgaattgattgtctttgtcgataatgcttacggtgaattctctgaaacaacggaaccaacagaattcggggccgacgtaatggccggttctttaatcaaaaatgctggtggtgggattgcgcaaacgggtggttacatcgtcgggactgaaaaattaatcgaaatgattggttatcgcctgactgtgccaggtgttggtgccagtgaaggcgccacacaaggcaatctgcaattgatgtttgaaggtttcttcttagcaccaagtgtgactggtaatgcgattaaaggggctgtttttgaagcagcgcttttggagcaaatgggcttgagtgtctcacctaaatgggatgcccctagaacagacttgatccaaacggtgaacttcggtaatccggatgatatggttaagttcgctggttgtgttcaagcgcaatcaccaatcgattcatttgtgacccccattccaagtgattttgccggttacgaagatcaaatcgtaatggctgccgggacctttatccaaggtgccagcatcgaattttcagcagacggcccattgcgcgccccatatacactttacttacaaggtgggttaacttacgcgcacgttaaactcgcgattagtcgggcagtccaaacaaccttctttgaaaaataaatgccaagcggtcaatcaaattcgcgtttgattgaccgctttttttgtgcgttaagcatggtatgataagggtgcaacgaatcgtagcggtcggttttaagagatgctttggattgttgctagtataaatgtgtcattctcgctacggtaagtcttggaggtggttaggtgttaattggtcaacaattaaaacaatttcgtttggatgcgaactactctcaacagacactcgcagagcagattaatgtgtcacgacaagtcatttctaaatgggagacggataaaagtgcaccagacttgaatacattggttgttcttgccaaattatataatgtaagtttgaatactttgctcggggttgaaacggtcactaaaccgaattcattctttgggcggttgcggcaacattggcatttggcagaaagcgaaaatacaaaaccgctgtccgatttaggacggattatgcaacaacccgaacaacactatgtggatttagcacaacagttcagtgccactttgacggatgtaactgttactagtgatggccaaacaatgccagcgaattggcggcaagcacggagtccttatttaattgtattagaaccgcgccaaatttgtttaaagcagacagatgttttaaaagtcatgcccgcaaaagttgttaagcaacttgcgacaacggaaattcgaacaattcattatgcggtcatgcagactgctggaccatcaaccattggcgggttacaaggtatcgggcacgcttatcgggccatcgtgacggttgatacaaagcaatccgtagcaccatactatattaccaaccaggattttcttcagttggcaaaagttctgaaagcttatgcacaacaggaacacgttcaatttgatgatcagatggctttgctgccttattttatgacgcatgacacaactgactgctttaattatttagaggtacattacagcgaattagcggaaaaagttggggttccagcagaaagcgcaggacaggcggtttatcgatggtagatgaaacagcaaaaaacaactttgaaacggcgacagatggggttcaggcttatcacaattattttggcacgccaacgcacgatgatcgtatttggtttgaactcttaacagttggggtcttccaagtggggttgagctggaaagtagctgcaagtaaaataccagttctgcgacaacaaatggtggggatggtgattgatcaagtcgcacaatttgatgaaatggatgttgaacgcctgcaaaaagaaccagatatgattcgtaatacgcgtaagattcgggcaacgattcaaaatgcgcgggcaattcaagccatccaaactgaatatggcagtttttcagcgtatttgtgggcgtttgttgatggtcagccgcaattgcttgattcacaaatggctggcgtgtccgataaatcagcgccgatcagtacgcaacttgcgaaagagttaaagaagcgccagtttaaatttgttggaccggtggtaacgcatttgtttatgcttgcaggtggtttgattcaaatcatcgatgaagactaatgcctaaaaggtaaaccaaattggtttacctttttttgttggctgatgttagaaaatctgacatcaaatgttgaccgtttgaaaggcgactggtaagataaaacgcaagtgaggtgaaatggatggctgaaaaacacttaaggcgcaacttagcagttttaccaattggtacggtaatgaaattgacgggacaaactgcgcgtcaaattcgttattatgaagcacaggcgcttgtttttcctgaacggacaacgggccatcaacggttgttttcgttgaacgatgttgatcgtttgttggaaatcaaggattacctagctgaaggcaccacgatggcacagattcgccagatttatcagaagaaggcggatcggcagcgtgataaacaattatcagacgaaaaagcgcggcggttattggccaatgaattattatcggtcggcggcttagttggacaacagtcaaccatttcacaatcatctaaattatattaaggggcgacggattaatggcacgtaaagtattgacagcagaagcaatcaagcaattagtggatcaagaaaacgttaagttcttacgtttaatgtttacggatatcaacgggattatcaagaatgtggaagtaccaattagtcaattagataaagttttaagtaacaaaatgatgtttgacggttcttcaatcgacggttttgtccggattgaagaaagtgatatgtatttgcggcctgatttaagtacatggctcattttcccatgggaagcggaacatggaaaagtcgcgcggttaatctgttctgtctataccgcagatggagaaccattcttaggcgatccacggaataatttgaagaaattagtgcgcgaaatgcaagataaagggttcaaagactttaacattggaccggaaccagaatttttcctctttaaattagatgaatacggtaaaccaacgctgaaactcaacgaccaaggcggctactttgattttgcccccgttgatttaggcgaaaactgtcggcgtgatattgttttggaacttgaaaagatgggctttgaagttgaagccagtcatcacgaagtcgcacccggacaacacgaaatcgattttaaatacgctgatgcagtcgatgcagcggataacatccaaacctttaaattagtcgttaaaacaatcgctcggaaacatggattacatgcaaccttcatgccaaaaccattacacggtgtcaacggctctgggatgcacattaatatgtcactctttaatcaagatggtacgaatgccttctacgatgaaaaaggtacagaacaactttccgaaacggcttatcatttcttagctggcttattgcaacacgcacgcgccatcacggcaatcaacaacccaacagttaactcttacaaacgattagtccctggttttgaggcaccggtttatgttgcatggtctggtcataaccggtcaccattgattcgggtcccacaatcacgcgggttatcaacgcgtctcgaactacggagtgttgatccaagtgccaatccttatttagcaatcgggtcgattttggcagccggtttatctggcttagatcaagggctcttgcctgatgctggtgtggatcgcaacatctatagcatggacgaaacagaacggaaggaaaatcacatcactgacctaccatccacattgcacaatgcattgaaggaactagccaaggatgagattatcaaagattcaatggggccttatctctaccagagcttcatggattctaaatcattggaatgggcagcttatcgtcaacaagtttccgaatgggaacgcgaacaatatttggaactctattagtcgcaatttacgccatgtttttgtacaattaaactttagaaatagaaagttggcagagtatgaaaacattggtgattatcagccatcccgaaattgagacgtcgatggtccaaaactttttaaaagcgagtgcagcaccactggaagccatcacttggcaccacttagatgcgcttgagacgttagatgtggctgctgaacaagcattattacgcaaccatgagcggattatttttcaatttccgctctattggtatgctgctccagcgagcttaaaaatgtggttggacaccgttttaacggggcaatttgcctttaatggccgccaaccattagccgggaaaacactcggggttgtcgtttcaactggtacggcggctaaacattttcaagctggcggcagtgaacaagcaacgctgtctgaaattttgcgcccatatgaattggtggctcgtaagctagggatgacctatttaccaccacttgcgattcatcaattgggttattggcaagaaactgataaacaatgcttggtcatcgattatcaacggtatttgacgcaatccgagttcaattttgatcagcaattagcgtggtttgaagcgatgctgactaaaaaggctgctgaagccacatcgcctgaagcgcaacaacgtttaatgcttttaagcgaacaattcgccgacaaacgatcggaattaaccgatttgaattggcaagtccaactgattcgcgaagaagagggggaaggctaatggattggttaacagaacaaattcaactacaaaaagaacaagccacaacgtatgaagagcaagctttttatacggcgcttcaacaaacgagtgatgaactagcattacggattgaacaacgccaaggtgaacttgatggtcgaatctggaatgcaacgaattggtaaactaatacaaaataaaaaacgccgcgacgaaagtcggggcgttttttgtgtaattcgattaatagcgtttgattaatgtatcgaaagcatcaacgattgcttggaagaaaccaagtgtatctgggtttgtgatttcttgattgtcatctaataagttcatgacattgccgatataagcttctggttgttgaaccgttggcatgttcaagaaaacaagtgattgacgtaagtggtggttagcaccgaaaccactgattgcaccaggtgaaacgctgacgatttcagctggtttgttatcccagatgcttgcaccataaggacgtgaaccaacgtctaaagcatttttcaatacggctggtactgaacggttgtattctggtgtgacgaataaaacggcgtccattgtcttcattttatttctgaaagttgtgtaagcttctggtacttgatctaaatcatcataatcttggttgtacaatggtaagtcaccaatttcaacaatttctagattataatctgatgggaataatggcatcaatgatttagcaactgatttgctaaatgaatctttccgtaaactaccaattaaaactgcgatattttttgtcatagtgaaacctccaattgttttacttattattagtaagtaactttagtatagcacgttcccctgaaaaggcaaccacttttacttactaatttaagcatagcgaattggtgaagcttttagcaaacaatatggtcggccattgattggcattggcaagctataaatcgtataatagcagtaagtagaacaaagatgggaaatgaataatggaaattaaatggcacgtcaatcaaccacaatctgttaaacaattcttgctagcaagtggcatcagtcaacgattgtacgccaaaattaaggcgttaggccaaccgattctagtaaacgggcaaaaaagtgcgcctagtgatcaggtacaatgcggcgatgtggtcacattgcagttaccagctgaactggccgatgaatcagttgctgttagtcacgaaccaatcactatttgttatgagaacgagtattggttggcggtcaataaaccagctggcttggcaacgattccgggtcccactaatcaaacggatactttgttgaatcgcattaagggttactggcaagcgcagggtgcaacagatttagtaccgcatatcattacgcgcttggattttgatacaagtggaattgttttagtcggcaaacaccaaattgcacaaagtctattgcaaccgcagattgaacagcatcaattacaaaaattctatttagcagttgtttcaggaacgggtttaccagcatcaggggatattcgtgaaccgattggacaaatcgaccatcaaccgcggcgtgaggtgttggcggatggtcagtcagcttggacgagttattggcgcttgggtgcatcgggtcagttgacggcggttaaagttcagattcatactgggcggacgcatcagattcgggttcacttcagcgcgttaggctatccattggtgggtgatcagctctatgatgggccgcttgatttagggataacgcgacaagcattgcacgcgtatcgactgcaatttcaagatccattcagtcaacaatcaatctcgattacagcaccgattgcagccgatatccaagcgattctacctacagaacgattaccaattgattgattcaaaggaagatgacaaatgaaaaaatggcaatggttactaatttgtatcttgtgtttcggcattggtggggttatcggtcatgtagcgactggtccaacaacggtgccatcgattattcagccaacttcggccaccgcaaaccagcccgttattttcgtaccggggagtaatggaacagttgaagggtttaatggcacctttgctaaattgaaccgtcaagccacacgccatgttttaaaagtaacggtattaaaaaatggtcacttgaaaaccagtggtcgctttgatcaaaaaatacaacaccccgtgattgtggttgcgtttgaaaacaatgcagatggtaatgagaacgtctttaaacaatccgaatggtttaaattggcagcaggtaaattagctaaacaataccactttacgcattttggtggggttggttattccaacggtgggcttgtattaacgcggtatgctgagcgtagtggaagtggaccgaagattacgcgattactgacgttgggaacgccatataatggcatgtcggagcacatcactcaggaaacaccgatgttagctgatttaaagagccgccggcaacatttatccaaagacttagtggtctattcagtcggcggcacaattaacgataagaatgatgggattgtcccagcagcgagtgttgcggctggtcggctcatttttcaaaagcaagttgctgattatatgacaatttcggtgagccagcaccatgcagcccatactgaattgccggataatccaaccgtcatttcactgattcaacaattgatgtttaaataaaaaaaggtgtgtcgcagcaagttgagctgtgacacacctttttaatactattgatcgattgttttcaagagattccgcgtgatgagcattccaatgatgaagattaaaatttctgttaatgggacactcacccaaacaccggttaatccgaaaaggctagaaagaaccaagacgctcgcaatcaaaacgatgtagccccgcatgatggccacgaaaaatgacaatcgaggttgcgcaatggcggtcatgaataagttattgacgatgttcatgcttgagaagaaaaaactaatgaaaatcaagggaatgccagcagacgcgtagcgaatcagttgttggttgtgttcatggttaaaaatttcgatgatcggtaatttaagaccaatcaaaacgagatataatcctaccgcaatcccgagtgcggaaagcaaaccgattttgagactcgttttgacattatcccaatgatgtttcccaaattcgcgactaacgattggctgaaccccgactgcaacaccgttgaatagggatagaccaactagtaagatgttggcgataatgccgtaagcggcgatggcatagttattactgagatggagaataacaatgttaaagacgaaaatgctgaccccagtactcatttcagttaagaaagatgggaaaccgagttgaattgctttgaacgtcggtttaaaacgtaaggttaagtgctgcaaagttagtaaccgttgtgggtgatgccggtgttgtgtcaaaatgagtaggctgacgattggcgaacaaatcgtagccatcgcagcacccatcatgcccatgtgtagggggaacattaagaggtaatcgaagataatgacgaataagctttgtgaaagtgtcgcaatcattgtcaaatgtggattactatcgttacgtacgaaacttaagactaagttattgatgataaataagggactgccaattaaaataattcgtaaataggtcaagcttggggcgagcgtttcatgattggcacccagtaagtggagtagtgggtgaataaaaattaagccgagcgccatgatgatgaggcctaataaaatcccaaaagaaagaacttgagtgaaaatcgagcgactcttttcgggatgcttgctcttgttaattgagaaaatcgtggcgcccccaatcccgagcatcagacctaaaccgttaaataagttaaaaatgggcagatcaatattcaaagcggccaagccaattggtccgactgcgtaagcgataaaatatgtgtccgctaaaatatagatggataagcctaacgagctgaaaacgtcacggatgatgtagcccgttaattcttttttgatatgtggtgagttttccaaaataacactcctattcaattggtagtggggtcgccattaataacgcaataaatgattgaattggtgctggcaaattcttccgggcgacaaggtagaattggcgttgatattgttgggacaatggtcgatagggaatttctgggtaatcaagtaaggctgcgctagaaactaatgattggccgataccctgtcttaatagttggataatcatcgcattgcttttgatggtcatcacgttttcgagtggtaaattattttctttgacgtaattcatcgtgtagtgatagacgccagaaccctgttcacgaagtaaccaaggttcattcgggcgacctgctaggaccagttgatcggtctgtagtggcgtccgaatcaagtctttttcggttaatggtttttcaatgaaaccaaagtctagtttgtgctgcgtcaattcttgaacaatctgcgatgagttgagtgtactgatatctaaggcgagtgtttcaagggctggccgatgcgctttaagcagggttggcaataagtaggttgcagtggtgtgcgaggcgccaattcggcacggtgtttttggctggccatcttgatgatggagtgcgtgcaaatcttggtcccataaatcaagaagttgttgtgcttgttggtagaagagatcagcactcttagtcggcgtcatctgctggcgcccattgcgttcaaatagtgtgacccccagcgcatcttccaattgtttaatttgcacagaaacggtcggctgcgatagaaaaagcagttgcgcagccgttgtaaaattcttggtttcataaacggttttaaaagttgttaaaattttaaacatatcatcacttctattcgttatcttaataacaactattataaagatttattttattaattgaaagagtttcggtatagtttaagataacaagtgagaaggagtaaagcaatggacaatataacaaaaaaaatacctggctttgcgttatcgttagcgattgcgattgccagttattacatcgctaaattatggttaccaatgttaggcggcgcaacgattgcgctttttgtcggcatcgtacttggcaatacttggttgcaacaaccggtattagcagccggaactaagttttccgagaaaaaattattggaatattcagtcatgttactgggtgcgacaattacattccaaagtattcaacaaatcggctggcatggtgtgctgtttaccgtgttacaaatgagttgtacgattggatttgccatctggtttggccgccggttgcaatttagcgaaggtacctatttattgatggccggtgggaatgccgtttgtggctcgagtgcgattggggcaattgcgcccgtcatcgatgccgataacgaagataccggcattgcgattacattggtaaatctaatggggaccatcttgatgttactcttgccagttattggaacgttgatgtggggacataataatgaactccgtggcgtgttaattggtggaacagtgcagtcagttggtcaagtggttgccagtgcgacgatgattaaccaaggaacggttgtcacagcgaccttattcaaaattttacggattatctgtttggtttttgttgtcagcggttttggttacttacatcaaaagaaacaaagtaaagtcagtgatacaaaactgagcgaacaattattagcgaagaagagtagcttagtgccatggtacgtgattggcttcctattattctgcgtcttaaatagcttacgggtttttccaagccaatttggtacactgtgccatttcttgagtacatggtgtgaaacaacggcgttagcagccattgggttacgcttgaacttaaaggcactcttcagccaaggtaaacgtttattagcatatgccggcggattagtgaccgtacaggtagtcctcgcgattttattaattacactattattctagggcgtgtcagcagctaggatgtttctaggaatattgaattattaaaaaatctgccatcaacaattttgttgatggcagatttttttgttattaagcttggtaagtgccgacttgaacggcttgttttaaagtggctggtgtgtgatgtgacttggcgaaaaattcgcttaaatcacgtccggctgttaaacctttaaaatgtttgccgccttgccaaggggcgattgcggaaaggtcataaacgacgccatcaacggcaacgtatgcgggttgaccatcttgaccgttatattgagcgagtgtttcttttgtaaagactttatctgtcatgattaaaaatctccttcgaattgtgaatgggttaccaataatatagcgctagatgcagaagttggcaacgattaagttgtgcactttgaaaatgaataatgttgaggctagcgaattagagaattattcgtgaccttaaatactgttcttcaaataataatttgttaaaataatcataattgggggggatgaaaatggacaataaaaaagactggttgatgcgacaagttgattcttttgcggaaggaatgggttatttgttatcgaaacaaagtggtaattcacagtcggaggttgtctttccacaagaaaatgctaaaaaattgccttttcaaagggaattggcaagtttaattgctaccaacgatactagaggggccgcccaacgattattaaaattacaatacgcaatgcctgaagaacaatttctacagttaggtacatggttattattagaaatgaagcaggacagttttcctaatcctttaacccgtgaagcgctgacagacgttttaaatacgattaattaaataattgaacgaaaaaaccaccctaataaataatagggtggttttatttaatattgatggacccgaccagattcgaactggcgacctcctacatgcgaagcaggcgctctcccaactgagctacgggcccaaacgcttacaaaaatattttagcacttttagctaaaatagcaaggcgaattagtgacgggcagatgttctgaggttatttgcttttttgccacctttaatcgtgcgggttttgaagtgggcttgttggctatcaggaacgaacttgaagtgttgcattttcccggcatagggttggccactgaggcgaatcttcaaccaatcttgcatggcttcaatcattccagtcagtttttcggcttgttcagaatttgcttgtttttggacttcggttgtaacatcgttagtgagataagccaataatttttgatgataggcaattagttcttctgtgagtggcgcttggttatattgattgaaaagtttttgaacaaaacgcattgcatctttagcgttttgtggttggtaaaagcgatcttgatcagacatagaatttccctctttcttcagagtagtataacgaataatagtgctcgtcacaaccgtgtgctttggtataatagagaaatactagtttttcggaggtcagcaatgtttaaacgtaaaagtgattggttcttagtggctgcactggtgatgatggcgatcttattttacagttcttcaatgacgtatcatgaacaaacatcggtgcccactttggaacgatttctcaagaatgaaccacttaaggcttggttaagtcaattttcgttccattatgcaggcagtgaacagagtgtaaaagcatctgggtatttcaaatttgtggagtttttcgtgcgaaaaggcgcccattttgggacgtatttcttattggcggcttttagttatttagggctacggccacgcgtaaccggtggttttttagcagttatctttagttggctggcagcaaccgggtatgcggccacggacgaatttcaccaaatgttgactggtgatcggacgccactttttcaagatgtgatgttggacagtgttggcgcattaacggggattgtgattgtttgcgcactacagtggatttttacacaaaaaaagagacgatagcccgactatcattgcttttagcatggtaatttgctatcatagaaaacgacttagtaccagaattctataatcgaaaagaggagttagatatgtcaggacattcaaaatggcataatattcagggtcgtaaaaacgcacaagatgcaaaacgcggcaagattttccaaaaactatcccgtgagcttttcatggctgcgagaagtggcggtcctgacccaagttctaacgccgcattacgtttaattatggataaagcacgttcagctaacatgcctaaagataatatcaaacgggcaattgataaagctgacggtagcgatggcgcgaactacgatgaaattacttatgaaggctatgcaccaggtggtgttgccgttttagtgcacgctttaactgacaataagaaccggacaagttcagacgttcgtgttgcatttactcgtaatggcgggacaatgggtgcttctggctcagttgcttacatgtttgatcgtcgtggttacattgcgattgcacgtgaaggcttagatgttgatgaagatcaaatgtttgaagacattctagaagctggcgcggatgatttacaaactgaagaagacgtgtttgaaatttacacagatcctaaggaattagcaaatgtccgtgatattcttgaaaagaaatacacattggcaaatgctgaattaacaatgattccacaaaatacaacaccggttgatcctgaaaaagcagaacaattccaacgtttaattgatgctttggaagacaacgatgatgttcaagaagtttatacagctggcgaactaccagaagaagactaatttgtttgataagtgcgttgcaagtaattgcaacgcactttttttgtgcagaaaattatccggttatttgcgtatctttggttagtcaggaaggagggacgagatgaccgaagtattaacaacccttttgcaaaagtgcgcaacggaaaaagcgcaggatctttattttcgaccactatcgacgggttgggcaattattgaacgcttagcgacaggactaaagccgttacaaaaagttactctgtcagaaggcaatcaatggctcaatcaaatgaagtatcaaggggggatggatatcagtgaaactcggcgtccacagaccggccgttcagcgatcgaggtggcaggcgaattgatttatttacggttggcaaccgtgggggattttttgaatcgggaaagtttagttgttcgtttcatttatcccattgggcagacttatcattgcgacgactcgcagattttaagtcgtttaatgcagttaattcagcaaccaggattattgctatttgccggtccaactggttcagggaagacaacaagtttgtactatcttgcggaacaagtcatgcaagataagatggtggttgcgattgaagatccgatagagattcaacagccagctttcttacagttacaggtgaatgaagccgcagggttaacctatgcagcattgttgaaaatcagtttgcgattacggcctgataccttaattattggtgagattcgcgacttacagacggcccaacacgcggtttctgcggcgttgagcggtcacttggtactaagtacgattcacgcgcgaagtacaacgggggtgatggaccgtctattagatcttggaattagccactcacaattaaccgcttgtttagcgggtgttgcctatcaatcactagtggtcgaaggccacaatgtagcggcccactatgagttagcaactgcacaacagttggaggaggctgttcatgaagactaaaaccactgttcaattcaatactgaatttatgttgctgttagggcgcttactgcaaaatggtttttctttacaacaagcacttgagttcatgccgattgtttttccgacacaaaagcagtggctgcatcaggtgcaaactgggttagaagcaggaaaacgactagcaccaagcttagcggcggtttcgtttccaacacaccttgttgcacagattgaattgactgagttgcagggaaacttaggcgagtgtttgttacatcttggccaattacagcgaattcaacagaaacggcgtagagagttagttggcgtaattgcctatccctgttttctactcctttttctcggggcgttgattgggatgatgcagatttatctttttccggaaatcgcgcagtttaacccaacaacttcggcgacatcaccattacaactattttttagagtgatggggacattcgttattatggctggtggtctgattagtgtgtatttattccgttggcatcggcgaccgctattacaacgattggcggcggcatttagatggcccttcatcggtaaaacgttgcaggcttactatcagtattgcttattatttgatttagcgacttgcctgaataacggcttaaacttggccgaaatgcatcagcttacacatcgtttggcgaaaacatcgtggcttgtacaattaatgcaacaacttgaaacggctgtccaaaaggggggcacgctattagcgaacttagcggatggcgttttttatccacctgagctgcaattagtgctcgctaagggaagtccgttacaacagatggccaaggaggttgatctgcttgcagtcattaaatacgatgaactgcaacggcaattgaaacagaaggtgaattggctacaaccgctcttgtttatcctaattgggatcatcattatttgtacctatctcagtattttattaccgctatatcatacaatggagggaatttcatgaagaagaaaagaaatgcatttacattgatcgaaatggtcgttgtgctagctgtgatagcaatgttagtcttgttaattgcacctaatttaatgcatcagaaagagacagctgagcaaaaaacggatacggctctagtggcaacgattcaaacacaagttgaattagctgaggatgacggtaaaacggtgtcgagtctagccgatttagcatcaggtgaaaaatatttaaccaataatcaggttaaacaagctgaaaaacgcggcataacaattaaggacaataaagttgttcaaaatacaaaataaggcgttcactttaatcgagagctgtcttgttttgttcattgttggagtagtcagtttatttgcgttgcaacatattcgagattatcgtgcacggcaggcggagcgtttattttttgaacaatttgaagcgtcttggcatgcgactcgcgaatatgtcgctgttgagccgcataatgtgcacttatcttgggatcaaaccaaccacacgttgcattacacaagtgcggatccacaataccaaagtatggatatcccgattccagaaacattgatgtgcgtcgatccagaaacatggtttaggatccaatttaatcatgactcagctgctagaccgcggtcattgatttgtcggtctaaaattgatgggcaccgttatgaatatcgggtccagatgatgtgggggatgttacatgttaagaagtagaccggcatttctattaatagaacaaatcgtggcgttaagtcttctcctgatgggaggcttgaccttgacaatgagtctacggcagtttaaagcacatcaagttcaacggcggtgtgctgctacagaatatgctgtaatggcaatggctgccaatcgattggcaaatgagcagccgccacgagcacaatggcagttgcaacgggaaacataccaagtcgtcaccaaaaaacaggccatttatgtcacaaataaagcgggtgagcgagttgcacttcaatggtattgttactaaacgctctggatttacactgattgaaatggttgtagctctcgttattctgatattgagcagtcaattaatattggcaaccactaaaacactaacgcacacaacgcaattaacccagatggaacgtcagaatattaattggcacattagtatgattgaacttgatcgttttctggatgacgctcaatttatttcaattgaacaggcgaattatgaacagcaattaaccgtcgctaaagattcgaaacgacgctataccttaacgaaaactaagaaggaactggtggtttcgagtacgaagaatggttatatgcctctgtttgatggggtctcgcggttaaaaatggtgtatcatgaaccttttttagaactcgaagcgcgcttaagcgatgggacagcctatcaacatgaatgttttttggaggcgcaacatgacacgaaaaatacagattaaacgctctgcagtcgcgctcttgaatgcagttttgatgttgagcttggtgacaagtgcgttgttgattgtgacccacagttaccaacagcaacaacagagttacgtcagtttgactaactattaccaaacgcaaatcttgcttaaattaacaaataaagcgcggcaaactcagtcaattcaaggtataaagactaacatcggtaagagtcgtatcgaccagcaacacaagttaatcatcattgagttaaacaatggttatcgaaaacagtttccagatcagaatgaaacagatcaaggataaattttctatttgataaagcgcttactatgatttataattctaggtatacccacctgtattacttgctttgccgttagaataccgatagaatataacaggaatctaatgaatagaggtggctattttgcctaagagtgctgtagaaacgttgtttgatcaactcgatcaaacaacacaattaattgaaaagaatttagaaacaacctatttggatgcactcaccgagaccattgctaatattgcagatggtggccgcgtaaaggttgaagacggcttaccagatgctgccactgttgcacaactagaaccgctttatgcggcggttaatctcaaccaatttgaagcagaagaaattcgccaagcattacagttggcaacgctcaagggtttgcgtcaagttaaagtggaaccaaacaagcaaatgacaccagatgcgatcggctatcttgtagcttatttggcagaggtttttggtggtgctgaccaaatcaagacaattttggacccagttgttggaacggggaacttattggcaaccgtaatcaatcatatccaaaaactaacggggaataccgtgcaaggttttggggttgataatgatgatagtttgttggaaattgcgggcatcagtagtgaattgcagaagcattcaacaacctttttccatcaggatgcgattgaaccgctactggttaaaccagttgatatcgccgttgcggatctaccaattggtttttatccattagatgaacgggcggctgattttgaaacccacgctgccagtggtcattcatatgcacatcacttgttgattgaacaaacgatgcattatgtgaaagaaggcggctatggctttttcctagtaccaaatgtgattttggaaacggatgaagctaagcaactgattaaatgggtgacaaaacatgtctatttgcaaggcttattgagtttaccagcaaacttgtttaagactaaggaaggtcaaaaagcaattttagtccttcaaaaacaaggtgccggggctaaacaagtggaccaaattttattaggtgaatttccaaattctaacgatcaaaaggcgtttgcaacgtatctacagaagatccggacttggcataaagataatttacaataatcgaatagaaaaggtgattagatgtcaaaagtattagcaattaacgctggtagttctacccttaaatggaagttatttatcatgcctgaagaacaagttgtcgcacaagggatggttgatcgtttaggattatccgattcagtctttaccgttaaatacggggatggtcaaaaattctcaatgacccaggatattaagacgcaagatgttgcggttgatttgttattgaagaagttaatcgaatttaaaatcatcaatgaatatagtgaaattagtgggattggtcatcgggtcgttgccggtggggaagactttaagtcatccgcattaattgatgaagcgtcattaaaacggattgaagaattgtcagaatacgcaccattacacaatcctgctgaagcaggtgttatccgtgctttccgcaagattttacatgatgtaccacaggttgctgtttttgatacatctttccatacaacgatgcctgaagaaaattatctttacagtttgccgttggaatattatcacaagtatggagcacgaaaatacggtgcccacgggactagtcatcggtatgtttcccaccgtgctgctgaaatgttaggcaaaccattggaagaattaaagatgattaccatgcatcttggtagtggtgtttcagtgactgctattaaagacggtaaatcgttggatacatccatgggctttacaccacttgcaggggtgacaatgagtacgcgttcaggggacattgacgcatcactcgttgcatttttaatggaaaaattaaacattaaagatccagcagaaatgatcgatattttgaatactaaatcaggtatttatgggatttctggattatctcctgatatgcgcgatcttgaaaaaacgcgtgaagaacgtccagaatcacaattggcaattgatatcttcgtcaatcgtttaatcaagtatgttggttcatacgttgccattatgggtggtcttgatgtcctagtgattacagccggaatgggtgaaggtgacatcttaatgcgccaacgcatcgccgatcgcttgagtttctttggcgttaaagttgatccagaacgcaataacgtgatggctcaagaacgcgtcatcagcgctgacgattctcgcgttaaagtattattagtaccaactaatgaagaagtaatgattgccagagacgttgttgaaattggccacgtctaaggcatcagtgaaaatgaccagcgcatggctggtcattttttagtggagggaatgggaatatgacaggttttacattattttatggcttattggcaattgccttgctcattatctggctgattgttgaaacgaaaatggtttggcgcgcaaaacggaatcgactatggacgatttttttatgttgtgctggaatcctcttactaggtttaacgttagtgatgggcagaacgctcagcgatcaaatcacaggtatcggctctgttgtaattttaattgtgattgctttttggcctcgtggtttaaccaaaacaagtttgattgcaaacttaaatactattcatcaatttgcagcgatttctaagattgaattactaacacaaggtgacttagtcgaagcttgtttttatgtcggtgaaattcggattgccaagttgcgctttaaaacgacggtagaaaaattacaaacctttttaaaagaccggtttcctaagaaacgcttaggggtgaaatagggttaaagtctttcatattactggctgatatgctaaactagtatttgcatatcggggccgttacggattcgacatgtgtaggtgagcgtgagttgcacttcgtaggttacgtctacgttaacaacgttacagttaattataactgcaaacaataacaattcttacgctgtagctgcctaaacaccagcatagcgtgatccgcctgacttcacccaagggttagatccgggtctcaaattaattgggttacgttaaacgctgccgtttgaggtgtttaaaagagatttgcaaactagctagttcatccgagcttctgtcggacggcgttttggactagcgaactcctaaatcgttcgactatgagtgtagagattgacgtggcaatgcgcatggacgcgggttcaacccccgccggctccattagataacaaggtgttaagcagaattaggcgcttaacaaaaggcgattaacactaccgtaacggtgttaatcgccttttttgtttgcaaaaaaataacagccacacgtgtgactgttacattaattgcttatgcccaacggtttgtttttgttggtaagagcattaggatatagaaccaaattgtcccgataagcggtatgaattcaatgagtacccaccagcctgagcggtctgtatcgtgaagtcggcgcattttaacggataaagttgcaatccaaacaatgaagacgacgatgttacgacccattgagatgcctaaatccccaatattatagatttctgaaattggatggccggttattgtttgaataataccgatgataataccacctagaatgtagttaatgatgattggccaccagaaatcaggtcggtttgaagtgcctgagaaatcaaaaatccgggaccaaaaactttgatatgatttaaccatgatgtaaaacccccttctccttatcagcttttcgcgtcgtcagttctggacgagatgaaaagttatgataaatttaataacttcctaccaaagatattatgacatacttaaacgagttttttacagtttttagcttacatagagaatcaataatttattcgccaacgcccattaatgaagcaagaatgaataataaccaaatgtgaattgggtagaacaagtagaagaaatacttcatgctacgtcctttttgtccgttgtacaagaggattgggataatcgcgaagatcatcatccattgcgtattgctagtgaagagtccagtgaaggcaaatccggagttgattccagcgtcaaggaatgcgaaaacaagaacggtaagacattgtaagagccggttgtttcggaaaagataaaaaaatactcctatgtagaggagaaggccattttccgcaagcataatggttggaataaccattgcgagattggcagcaaacatcattgtcttagggttagcaattagaccaagcgccaataatgataagaggataggagcaataattgccagtccaccaagcaaaatttgtttggaatggtgcgtgcggcgaccgacactaatttcttgaatcccatacattgctaaaacggcaatgtataaatcggtaaaaatattgtttgacagtgcgaggttaccgacttcgaagaagtgttggacaatggggcttcccaagttcataatccaaaaaccaacgagtaattggaacatgtaacgtttttgattccgcgtatgtatgaatccttcaactgccataaagaagaagatggtggcaactggtcgtccgaaccaatcaacccagccagggaccccagccccggcgaacatttggtgcacgtgatcaataaacatgaggataattccaattacgttgatgtcgaagttatttaaaacttgatatgatttagtctgcataatagcctccctaaaagttaagtaagtacattatcgtatgtttagctcatattattaagttttaaatggctagtgacaataatgttagatagcaaaaaccacgataaaaggaatttatcgtggttctgagcttatttagcaatttggcttgtgccatctgcgtaatttaatgtaacgccgtcttggacgttaaaaatgtaagtgttaaattgaatgctgttatccccgacggattggccttccatttgaacgccgcgggctagcagctcattatcgttaaaaataggtgtgacacggtaacgaacaaaacgattagggtgttttttgagataataagcaatatctgattcatgggccagcatttcgggtgcgtttagctggcgtgttcctgtcatcagattctttggattattattttcaccggttagttgatagccaattaaatgactccgattatacagccagccagatttaatccgcttattatgccaaccggtcggattccaagtgagtccttcgcgcttggcagtaggcatcatcgattgatttaaaagaacatttgcagcaccaacgcgatttagtgcgtcgagattactaaaggtttgccaaccaccgtgatcggtagccaaatcagtagcactgaagcttggttggttattattgacgagtacctcgttttcaccacggtaggtgagggccgcgagctctgatgtgttatgacgctcaagactagtcgtttgcatttgttgctgatagttagtgagttttttgtttaactggttaattttacgttgaagcgcattaatttgacgttcggtttttttgttgtgcgcattaatgcgcttggtttcttgacgtaaggtggtagcgtgaacggtagttggttgttgcaaaagggttccgacaccagcaagtgaaattgttaccaccacgcgacttatcaaacgggttgctttcattggctaatcctcccatccgcaaagggtatagccttctgcttgtgcttgtgacaatggcatggttgtagtactgttggcacgacttaagccacggcaattgggatcaagatggtattttttaccagaattaggggcaattgtcaccatttgttcaacttgttgagcactagcagcttgttgtgcttgttggcttgcctgaattgcagcctgttgctgagcggcctcgctagcttgactagtagcggcgattgaggctgaagccgcacggactctttctgactcagacgctttttgctgctttttaacaagtcgtgattgactggcaacttgttttgtcagttggctagcctctgttttctttgtagctagttgtttttttaaagcgctcgagttagcacgggccgccttgttttcgcgtacatcaacttgatgttggctggtcttcttggaattcgcagcagccaccggcattaatgaaccgcctaagccgattaaggcgatgatgataatcagtacgcgacgccattttctgggtcgttgccggttaaagaatagtagtgaaatcagtgcgctccccaagaacgctaaaaataaataggacataataacctccaaagtaatgaataacagttcttaacgattgtatattgtacataatatgaaagcaattataaaaagcctaggcgtacctaggcttttagcggttaatctttggttgtgagtgaaacaattgcttttgtttgatagtatttttcaggattggtttcaaaagttaaccaatctgcatcagcgaatagaccagccaatgcaagaattgggcgttctttagcgagttgttgttcgctagaagttgcaatggcgtcttggtagctaccattgaagatttcatctagataaaaggcttgatcatcaccaacgtttaaataggtagtatcattcttccaagcatgtagcaaatccatttccgaaaaagtaacggtttcgttatttgaaaaagtcatgataaattgcatatgggtcaactccaatcaattaattaagcaacaatctatttggttgcctgcctaaattatagcatttagataataaaaggcgaaccttttgacagtcattgtggttaaaaagtagaatgaaggtgaacaaaatagaaaggaagtcattgatatggcaaacgaagaacgattagatagtttgaaaaatgtaattgaaggcacagttaagaaggttgtcagtgaagtgacacctaataaagataagaaagaaaaggcgcaaaaagctgacaaaaaataggacttagtaatgaagtaaaggtcaaaatcatccgtttggttttggcttttttattggaaagccgttaaatgcgttcgcttttacgaggcaggcttggtataatttaaaggatagtcagaggaagtaggtacaattaatggattacgcaggaatgttagaccggcaaaagcacattcgtaatttttcgatcatcgcgcatattgatcatggtaaatcaacattagctgatcggattctcgagatgacggatactattgccaagcgcgatatgcaagcgcaagtcttagatgacatggaattagaacgtgaacgtgggattaccatcaagttaaacgcggtggaattacactaccatgccaaagatggcgaaacttatattttccatttaatcgatacacctggacacgtcgatttttcatacgaagtgtcacgaagtttggcagcttgcgaaggcgccttattagtcgtcgatgcggcccaaggggttgaagcacaaacgttagccaacgtttatttagcggtcgacgatgatttagaaatcgtccctgtcattaataaaatcgatttaccatctgcacaaccagacgttgttaaagcagaaatcgaagagatgattggtttggatgcttcagaagccgtgcttgctagtgctaagagcgggattgggattgaagaaatcctagaaaaactggtaacggacgtgccagcaccaacgggtgatttaaaagcaccattgaaggcgctgatttttgattcgatctacgatagttatcggggtgttgtgttaaacgtgcgggtttttgatggcactgttaaagtcggcgataagattcgcttgatgaataacgggaaagaattcgaagtcactgaagtcggtgtgatgtcgcctaaagccgttaaacgcgacttcttaatggttggtgatgtgggttatattacggccagcatcaagaccattcaagatacgcgggttggggatacggtcacccttgctgacaatccggcagcagaagcccttgatggttatcggcatattcaaccaatggtttattctgggatgtatcccgtggataacgcgaagtttaacgacttgcgtgaagcccttgaaaaattacaattaaatgatgccgcgttggaattcgaacctgaatcgtcacaagcattgggctttgggttccgttgtggcttcttaggcctcttgcatatggatgtcgtacaagaacggcttgaacgggaattcaatcttgacctgatcatgaccgcaccatcagtggattatcatgtcgatttaaccgacggcacagaagaagtgattgataacccaacagaaatgccagaaacatcaaatatttcagaagttaaagaaccgtacgttaaagcatctatcatggtaccgaacgattatgtgggggctgtgatggaacttgcacaacgtaaacgcggcgaattcgtcacgatggattacttagatacctatcgggttaatgtcatctacaacatgccactgtctgaaatcattttcgatttcttcgatgacttgaagtccaataccaagggttatgcctcattcgattatgaagtgactggctatcgtgcgagtgatctggtgaagatggatattctattgaacggtgaatccgttgatgccttgagttttatcgtgcaccgtgactttgcctttgaacgaggcaaagcgattgttggtaagttgaaagaaaccattccacgtcaacaattcgaagtgccgattcaagcagctatcgggaataaagtgattgcccgttcaacagtcaaggcctaccggaaaaacgtgctcgccaagtgttatggtggggatattacccggaagcgtaagttgttagaaaaacaaaaagccggtaagaaacggatgaaatccgtgggttcggtggaagtcccacaagaggcgttcatgtccattttgaagatgaatgatgaagataaagccggtaaataaggattcttaaaaatttaatagtgataaaatagcagttttgccaacattttgccaacgtcaattttcgttggttggcaaaactgctatttttttgtgtttcgaattattcaagatagtgctcttgccaacattactcgttctgaatttgttcgatcagactaactgtatttttgcgcattttatgagtgacatgagaataagtgtccattgtcgtgctgattcgagaatggcctaaacgttcactaacgactttcattttttctccggcttctagcagcatagtagcgtgagtgtgacgtagtgaatggaaattaaaattcttatgcaatttgtcttggactaattgcgccttatatttaatcgagttaggaaggacgggggtaccattttcttcggtgcacacaaagttacggctcctatgatggaattacggacaaactgttcgatataatacatcataaaggagctttttattatggcaattaaatattcaaatgaatttaaagaatcgattgttagcttaagtcagactggccgttcggccaactcactggctaaagaatacaacgtcagtgtttcaacggtcactaagtggattaaacaagctgatcctaacaacactaaagtgctatcatcaaatgaacgtgctctgattaaagaaaataaacggttaaaagaagaacttgatattttaaaacgagcagcggtgctcatggcaaaaagctaattattaaagggcgtgccctcgtgttagaagtcgtcaacgctaatttacttgctgggcaccgcattacgcgtatcttatcagtactcaaaattccgcgctcaacctactatgattatctacattggcagccaagtagaactgaacgccgccggcatttaattaaacaagaagtgttaacggcttggttaagatatccaatgtatggctacccacgattaacgatcttactaaatcaacagtctgatattcacgttagtcagcgtctggtctatcaacaaatgtgtgaattagggattagatctagaatggttaaacgaatcaataagccaaccactcagactgattatgatcagcgaccaaacttgaataagcagttaactgatcaatctggtattttattgactgatattacgtacattccccttaaccatacttggtgttacctagctagtgtctataatccagtaacccgacgggttattgcttaccaacttaatacgcagatgactaaagaactagcgactaacgttattacccaagtcatggcgcaagcagttaaaccgcaaattattcatagtgatatgggaagccaatacacaagtgacttatttgaaaacactttatcgaagtatggtatcaagcattcttactcccgaaagggtcagcccggcgataacgcgcgaattgaaagttttcattcaattttgaaacgtgaatacgttaatttccaagattttaagacaattcatgaagcactcgccggaattgataactatattcgttggtataacagtgatcgtatttcacttgtagcgtagctacaggctattaaattcaataatgttagggcttatttaatatactctaaagcgtttttaaaatctgaacgggactaaaacttcggcctctgaaaattaaattaagtaatttaaattgaaagtcaaatttgttcgtacttttatgtccggattcttgacataggagccgaagattctatggagtatctatgtaaaagaaaacactgtaacagcagctcagcttgaaagcgggtatggtgaaactcgattcagatattataagaatcgggcatgcctgcaatttgcagatgcattcatgattgaagacttgcacgagttcaagaaataaaaagtgcggtttttgtgcggattgtctgtggttattagccggatttccgtgataaattagtattatggattattagtaaagcgcgcttaaactgtgaccagtaatcaccggcggaaaacggtggtcgcgctgttgccaaaaatacgatctgttatacccggcaattagcgttaatcaaactttgttaggttaatcgacttcaattctaattgctggaagcgtggggttagcacgttgttgccgtggatgatcgcggacctaaccattattcctagtagcttaagattagagcggcacattaacgtgatgtgaacacgattcgggtttaagtcccgactagggtattatcgcagtggcggaataggtaaagcgtctttacgccttaaaacggcaattgtgtggtgcaaatccacacctgcgatattgccagtaatggcacatacttcacctccaatagccctagcctttatggctggggttttgtattatagatttattggagggtgaaaattatggatagagaaagtttgttagaaatgatcaataatccagaatcaattttaaaggctgataaaaaaacgcttaagcaaagaatagagcaacagaggttaacagctgatgagtatgcagaggctgcaatcgatacaggaaaatctaaaggtcgagaattggttgttgatatattaaatgggtctttagggagtcttatttttgatgtgattgaaactggcgatgaactaggccaaaacatatctgatatgaaaaaatctttggtcgttgcttcttatgtacaaaaatcagacgaccacgataaagcgttacaatgtattgttgacttaattacggatccctatggtctgacattgtattcaaaattaatagaaatacttaatgattcaccggcagatgatgataccttaaatgttttagccaacgttctaaggaatataagtaatgatagtgatttaaaagaacacttttcaaataagagagttgtgttgtctatgattgccaaactatcaccacaggcactcttagtattgcagaaagctaatagatggccgattatgaaagctcccaataaagcaagcatcactgttggaggaataatgaacggtgataacagtgagtatattgcacaaggattattaaaaactgaaatatttaatgacatttcaataacatcattaggactagcaatcaaggagttagaagtaaatggactatgtttcacggcgtctggcacgtttggcggtaaaaatgcagtacaagaaactttaacagattcgggcaaagaggtatataaattaatctattaatattatcaaggcagcctaggctgtcttttttaatcccgaatatttgtagtactgtaagattgagtctacaattaaagtaagaaagaagggatatcatggtagtttatgtatttgggcttcctagtcccaaagatgtttataagcgcgcaaaggataaaattcggaaacagaagaaagataaagagaagaaagcagaagaaggaccagttgcaacaactgcttaaggtaatgaaggatgtcaatacgacgtcctttttagttaggaggatacatggataaatctttttttgaactagtacaaatcatactagactctgattattcgccaactgttaaattagtagaaatacaacgtgtaattgatgtgatgatgcatcacgaaaatcaataaagagatatttgaaaacttttttaataaagtgaaatgcaattacaatcattagggaagtagcgacataaacatgaagttgtggtatattctggttaacggaaggtgatataatgtcaaagactattaatgagcaagttttcgaaataattgatgaaatgtataatgatttggcccacaaagaaattgatcagcatattaaggatattcttttaattgcagcaaaacatttatctacagaagatatgccagctcaagtggtagcagctaaaaccgtaaatggaattacaatttgggccatgaatggtaagaacttattgggtaatgaaaacgctgaacgaatccgaaaattgatgcggattgctcgctccgagggatacaaatggaatgcgactggcttaggttcattaggcgtacaattttaaaagagtttatcttgagacagcttaggctgtctttttttgtacataaaattaaaggagtgataggcattgtgaaactaatacattcaaagtacggctacgaaacacctgaatggacggcagcagatgcccgtttagagaagtggcttaaacagaagaagatagatgagaaacgtcgttcagataatgagcggcgtattttattggagaaaaacaattataagaaggagggcggtgctatgtaatgcatgatgaatcaagaaatgatgcaaaggaagactatttatctgggatgaagtacaaagacatcgctgataaatatgatgtgtcgattaataccgtgaaatcatggaaacagcgtaatggatgggaacgtgggccaaataaaaaagcggtgcaccccaaaagcaaaaagggtgcacacaaagttgaaaaggttgcacccaaaatagtgaaggaattatctgctaatgatgggttaaacgatcaacagaaaatgttctgcttgtactatctgcaacgattcaatgccacatgggcttatatgcaagcttatgacgttgattataagaccgctaatgtaaatggcccaaggttgctagtaaatgctagtgtgcgtgagcaaattgataagctgcgtaacgagattgctaacgacctattcgttacagctgatgatatcgctaaagagtacgctaaacaagcattcgctgatattggcgattacgtagggctcctatgtcaagaatccggacataaaagtacgaacaaatttgactttcaatttaaattacttaatttaattttcagaggccgaagttttagtcccgttcagattttaaaaacgctttagagtatattaaataagccccaacattattgaatttaatagcctgtagctacgctacaagtgaaatacgatcactgttataccaacgaatatagttatcaattccggcgattgcttcatgaattgtcttaaaatcttggaaattaacgtattcacgtttcaaaattgaatgaaaactttcaattcgcgcattatcgccgggctgaccctttcgggagtaagaatgcttgataccatacttcgataaagtgttttcaaataagtcacttgtgtattggcttcccatatcactatgaataatttgtggtttaactgcttgcgccatgacttgggtaataacgttagtcgctagttctttagtcatctgcgtattaagttggtaagcaataacccgtcgggttactggattatagacactagctaggtaacaccaagtatggttaaggggaatgtacgtaatatcagtcaataaaataccagattgatcagttaactgcttaatcaagtttggtcgctgatcataatcagtctgagtggttggcttattgattcgtttaaccattctagatctaatccctaattcacacatttgttgatagaccagacgctgactaacgtgaatatcagactgttgatttagtaagatcgttaatcgtgggtagccatacattggatatcttaaccaagccgttaacacttcttgtttaattaaatgccggcagcgttcagttctacttggctgccaatgtagataatcatagtaggttgagcgcggaattttgagtactgataagatacgcgtaatgcggtgcccagcaagtaaattagcgttgacgacttctaacacgagggcacgccctttagtaattagctttttgccatgagcaccgccgctcgttttaaaatatcaagttcttcttttaaccgtttattttctttaatcagagcacgttcatttgatgatagcactttagtgttgttaggatcagcttgtttaatccacttagtgaccgttgaaacactgacgttgtattctttagccagtgagttggccgaacggccagtctgacttaagctaacaatcgattctttaaattcatttgaatatttaattgccataataaaaagctcctttatgatgtattatatcgaacagtttgtccgtaattccatcataggagcccgtgtctattagaggcgttcatgtccattttgaagatgaatgatgaagataccaaaggtaaataaaaaaataaaagcgtgctagtcgaggctgactagcacgcttttttgcgttattgaaaagaaataacagttttaccaacacgttaatggatagcgattgagacgagcaggatgtttggtccctataaaaagccgctccagaaagctattcatgctgcgcgctgttgatgggtgcaaataacttaatgcaatataatgcgctaagtccaacaaggacatatacgatgcgcgaaataatagctgcttgaccgccaaataacatagcgactaggtcgaatttgaatagaccgacaagtagccagttcaaaccaccaacgattaataaagtaagcgcgatattgtctaaggttttcatagtgacacctcctttagtagttaagataacatcctcaaaggtggggaacaataaaattgcttagaccaagttttgtaatttagcaaagaattaagggtggttttttagaagatagattgcaaaaaaagcatgctagtcaaatttgactggcatgctttttggtgtttattgaagcatatcgattagtttcagaaagatcatcatcacgaggatgctgacccaaaagagcacattcgatttcttcttaagttggtcatttttcttttgttgggcgatgaataagatgactgatgaacttaagacgccgattgcagcaatgatcacgatcaataataaaatgagatgttgagcaggtgacatgatgaggctcctttaactgattgattctaaggagcagtataccaaaaaaatggagagacgagaatagtgaatctacctgatgaagcattaactcttggtaagatacatcgtttttaattggttgagatccgccttagttaaacccagcccgtgtttcaaataaccattaacgccaccatattctttgttcattgtgtcatatgcgacctgtagatagggtttacggacggccatcattgcagtgatcgttttaacggctttggggttattgtgagttgccaccttaatttgttcaattgtcttttcattttcggcgcggcgatatttattagaggcgaggtagtcgtccatgatgctcttttgatcaaccccgagggcactgaggactaacatagtaccgaatccggcacgatctttaccggctgtacaatgccaaagtgtcgcaccacttttattattcaataagacattaaagaactgtttatagttcgtgcgtgctgcgggatcagtaaccaatttttggttaatatcaatcatgaaaacttcaccatcaaccttatcgagattcttgaaaaagtcagcttgacttgccgaagtccctaaagacttggtgacatcatagtgattgtagtggacgttgcttaaagcgggatcgggtttagccgcaacttcgctactagtccgtaaatcaacgatgttatttaattgttttccaacggttaacttctgtttatccttcgttgttaaaccagctaattcaccagaacgaattaaccgattggctttaattttggcacctgttttcgtgacaattccacctagatcacgagtattaatcgcaccggctaattgaatgtggcgactcatgttttgtttagggacaagggtggattgatgagctgtcgattgtttagcatttttttgtggggtacagccgactgccaaaagtaataaagttgttgttgccacgtaagggatgattgtttggctcatgcgcatattgattgctccttgtaaaacgattttttattctttacaaggttaagcataaacaaataatgtaaagtgtttgttgttctagtgaaaataaagtgtaaagcttcgtaatggtttggtaaattcataaaaaaaagcctagtagtggtttaatgatacaatggggttaacttttagatatggaggatgataagatgcatgcaacgcaactattaagtgcaacggtcgaacgcgctcaagaacgattactcgatacattggaacaaatgacagtggctgaggccaatacaatgccgcagccactaattaaatcggtgacctggttagtatggcatactgcccgtgaaatggattatcagattgcggatttgaaagggatacaaccattgtggatacgtgcaggttggtcacaaaaatttgcattagatctacccgatgaaacgcaagattggtcgcattcaccagaagaagcagccaaagtgattatcaccgataaagcattattaattggttacttagcagacgcattgcaattgacgcttgattacctggctgaagttactgacgagtctttattagagataattgatgaaaattggacaccggcagttacccgtgaagcacgcttagtctcaatcgtggatgatgcggtcatgcattccgggcaagctgtttacactagaagaatggtaatggggaaataactgctaggacaggattggaatcggtttaacgaataattagtgaagggtaaaaatagataccgtatggtatctattttttgttatccggcaattgaattgcgtgctactatattaaatgtaattaataataatttggaggaattatcaatgaagacaaaattattttcagcattagcaacaatggtagcaccaacagcaatgacagtggggtcagtatcagctgacgcagttgctccgcaaacatcaaaagccgactttagtgttgttgctaaggatccaacaaacccaacagatcctgaaaatgggacattagtattaaaatcagtaccaagtttcagctttgggacaattgaagctagtgcgatttatgctggttttactggtaaagttgctaaaacagctggcgctttagaaattgctgatatacgtttaggcaaatctgactggtcgttgacagctgacatggctcaattcacagatgatgctaataaactaacaggcgcaatattgaatttagattctactggttcacttggtgaaactttaacaggtgctgttaaggacgattctcctgccgttgaagtggttaaaggtaacgggaaacatggtgtcgataatttcaagatggaagcagctacgttaacattagcagcaaatccagcagccgatttagctaaagatgagagtttcacaacaacaattaattggaatctttcatcaacaacaccaactgtaccaactgcttaatcattttactattaaacgcacgaaataagtgaataaagttaacgaagcgattgatgtggagggtgaaaagtataagccagatttgtattatactggaaaattgaataaagatccgaatacaccagggattccagctaaatataaaattgctgcagggaatgtctctaaagagaaaacggtttatgttggtgggttagcagcctacaagaaagcggcggatctcggtgggacttggtcagttgatggtttgtcagacctagctaaggcatctggttcaacgagtaattggcattatgaatggcaatttacagatggtgaggataagacaataacccccgctactaatagtggtgtttctaatcttaagggtgacattacaaatttagcgaacttaaatacggaacaaccactaacctttagtaaagatagtactttcatgaaagatgctgcagctgcaactacggctggaaagagttatcgagcacagctaacattaacgactaacgtaacggaagaatcaagtggaagttcaaaaaaagttacgattgtttctaacgaagctgaattacaagcgcaaccagcagttggtaagttgtcattggatcaagtgcctagctttagatctgggaacgtcttatcaaaagatatttatgttggtacaactgctcaggacaagcaatatcaggtcagtgatgggttgaaaatcacggatattagagcaacgccaggttggaaattgacagcgaagatgagtaaaatggcatcaaccacaggcaaacaattaagcagcacagccattaatatgactggcttgccaacgaacgtaggattatctgataatggtactgaaacaccgattatgacggataagatgtcgaaaacatggcaagttgctgggaaattagcattaagtgccaatccaagtattcaacttgcggctggtgatacattctcgagcaacattacgtggactttaaatagcgcacaacccgcagcaccagcggcttaagttgttgattagaattaataagtaaattaaaaaagatgaatgatttcctgaatatcagggaaccgttcatctttttttgttagtcgatatatttaacagccgtgccataagcggcaactgattgcatatctgttccgattgaaccggaatcaaagcgcatcgtgacaaccgcatctgcgcccatttcaagtgcattttggcgaagccggtcgatggctacatcgcgtgattcagtcatcatttcagtataggctttgatttcgccaccgacgacatttttcaatgaagcgccgatgtttttgaagacgttcttggatttgtcatgattaaagctcttttttagaagaataagattaacaataatgtgattaaagcgggtaagccttgtaagaagaaaattttcttggtggcggtaaatgtcccgtaaagggcaacgatgaagatgtagagcattaatagggcgaggacaatcttgagcgtttggccggctaataacaggttgaccatgataattacggcgcccaacattccgttataaatgccttggttggccagtgccacgcgggcatttggtagtttgacaaagtccagcggcatgtcaaaagctttcgcctttgtttcagcactggcaaacatttctagccccatgataccgatgtgttcaacggcgattagataagttaaaacaagaatcaatacttgcataagttagtgcctcctcaatagtggtttcattataacaaaaacaatgacgcatgtccaaattaggccataaaaaaacacgccagagaatttctggcgtgttccttcatcattaaccgcggtctgtataaccgttgggatgatttaaatgccaattccaggcagtttcaataattgctttcatattgtcatactgtggcgtccaacctaagacttcgcgtgctttgtcacttgcggcaattaaagtacttggatcaccagcacgacgcggtgccattgtcacaggaattgccttgccagtcactttgcgagcggcttcgacaatttccatatttgaaaaaccagttgatgagcctaagttaaaggcgttactatcatggccttcttcgaggtaaccgagggccaaaatatgggcgtcggctaagtctaacacgtggacatagtcgcggacgttagtgccatctggtgtatcataatcatcaccaaagatggagagttgttcacgtttgccagcagccacttgtaacacgattggtaacaagtgggtttctgggtgatgatcttcaccgattgaaccatctggtttggcaccagcgacattgaagtaccgtaatgcaacgaatttaataccgtaagctctgtcagcccatttcatcatcgtttccatcattaatttactttcaccatacgggttagttgggacttgtgggtcggattccttaattggaattgatttcggttccccataagtggccgctgttgatgaaaagacgatgtgtttgacgtcgaattcattcatcacttcgagtaaggcagtcatgccgtatgtgttattgtcgaaatatttaagtggtgcttgcatcgattcgggcacgattgagaaagcggcgaaatgaatcacaccgctgactttttcttgttggaagacgctgcgcatgaaatctttgtcgcgaatatcgccttggtaaaagcgcgcttgtgaattaatggcggcttgatggccagtgacgagactgtcgacaacggcgacatccgtgccgcgttgaattaattgatcaacggtgtgcgagccgatgtagccggcgccacctaatactaaaactgtcatggttgtttccccctatgtaataaccttgtgtatcaattaacagtatatcatttggactgataaacaaaagcattgattggattattaaacgaaatataataatctttgctataatgggtaagttaatgatttggaagtagcgagggattaatgtggaagcacaatatgaatggcaattaaaagcaacaccaactgaccaagacttacaagcaataatggcagttgaagcactcccgaaagccgcagcccaattgttgtggcaacgaggaatcaaaacacctgaggcaatcagtgcgtttatgcatccgaatgtcggtcaattacatgatccatacgctttgtatgatatgcaaacggcagtcgatcgaatccaagcggctgtgatgggcggcgaaaaaattacagtctacggcgattacgatgccgatgggattacaagtaccgctttgatgcaagagacgctcgaaagtttaggcgccgatgtggaagtatatgtgcccaaccggtttaaagatggctacgggcccaatttagatgtctataagcaactcgttgaaaatgggacccagttgattgtgaccgttgataacggggtgagtggcttagagccaatctcctacgcgcaagaacacggtgtcgatgtagtggtcacagatcaccatgaactaccaagtacattgccaaatgcgacagcaatcattcacccccgtcatccagagggacagtatccctttagtgatttatgtggggttggggtggcatttaaagtcgctacggcattattggaagaaatcccttacgagagtttggacctagtggcgattgggacggtctgtgatttagtgtcactgactgatgaaaatcgcgttttagttagcttaggcttacaacaattacaaaataccagtcgtcccggtttagtggctctttgccagtcagcgggtattgaacaagaaacgcttgacgccacatcgattggatttgggattgggccacgtttgaatgcgattggtcgcttaggtgatgccaacttaggtgttaatctattaacgactttcgatgaagaacaagcggtggaacaggcccaatttgtggaacaacaaaataaaaagcgccagggtcttgtgcaagaaattactgcgctagctagcgaaatggcacaaacacctgagaaccaagctagtgcgaccttagtgttggcacatgaaggctggcatgaaggtgtgctggggattgtggcgagtcatatcgttgaacaaaccggtaagccaactttagtgctagcaattgatctagcaactggccaagccaagggatcgggacgaagtgttgaagcatatcatctctttaaagcgcttgatgcccaacgcacattgttgacgcactttggtgggcatcatatggctgttggcttaacgatgccagtcgatcaattggctgctttacaaacggcgatgaatacttatgccgctgataatcagattgatttaacaacgaaacccacattggcggttgatttacaactcgcattagctgatgtgacgcccgatgtttatcaagccatcagtcaattagctccttatggcacggataacccagaacctttgattgaaatgacggtgccatccgtcaccaatgtgaagcagatcggtgcggatcagaagcatttgaaatttacggcggttgatcaagaagcgcagttagcagtcttagcatttaaccgtggtgcgttgtacgacgatttacaagcggtggaacagttgaaattagttggtcaactaagtgagaatacttggcgcggcaatacgacgttgcaattgatgctgaaagatttacaaacgagtgggcaagtgttaatcgatcaacggagtaatcggttgacgcaacagttgtttaaagctagtggcacctatgtctttttcaatgagaagcatctggcacagctacaaagttatatcccagccggcagccaagccatcttagcagccgatgtcgcacagcaagcagaattgattgtggttgatgaaccaactgatttagatgaatttgaagccttttatcgccaacaacaggccactaaaatcagctttatcttctatagtaagtattcggcatatcttgatggtattcctgataagaaacagtttgcgactttcttggtttacctacgtcaacatccaggaattgaaaaagcacggttaggggaattagcgacttatctaaaaattaaattgccgctattaatttttatgttgcaggtgttttttgacttaggatttgttaaaatagaatgtggtctcatttcggccgcggaacaaccggaaaagcacgcattagaaagtgcaccgagttatcaacaacgattagctaaaattgacatggaaaagcagcttgtttactcaaccttcgcggagatgaaagactggctggcaggattcaatcagtagcaaactgttgaaagagttaaggagcgaatttaaaatggcaatcaactttaaagattacgttgcaagtgtgcccaacttccctgaagaaggtgtcacattccgtgacatctcacctttgatgtctgatggtgaagcatatgcagcagcaaccgacaagatcgtcgaatacgcaaagagtaaaggggtcgaaatgatcgttggccctgaagcccgcggattcatcgtcggctgcccagtagcttacaaattaggcgttggttttgcaccagcccgtaaaaaagggaagttaccacgcgaaaccgtctcagcaagttacggcttggaatacggcgaatcaacattatacatgcacaaagacgcggtcaaacccggtcaaaaagtgttggtcacagatgatttactcgcaacaggcggcacaatcgccgcaaccatcaaaatggttgaagaattaggtgggattgttgtcggaacagcctttttaatcgaactaaacgatttaaacggtcgcgaaaaaattaaagactacgatatcttcaaattaatggattattaatggatgtctttctaagctgggagagtctgagcattaacttaggttggtgaataaccgatgcaatcgggttgtttgcgagacgtggctagacggaagaaattgcatcagaaagcacgttaagaaaaaatgtaacgtcagtcagtcgctaaacgtaaggacctggctgaaggaacatgctaaaaaaggattcgccataacggcgaatccttttttgatagctacattctgtcgcggtataggccaacgaccttacctaagatgctaacttcattcaaaataatgggttcaaatgtatcgttttctggttgtagccgataatgatcaggttccttgaagaatcgtttgcaagttgcttcatcttcagcagtcattgcaatcacgatgtcaccgttatcggcagtcgcttgtttacgaacgatcacttcatcgccgtctaaaattccggcactaatcatactttcgccgcgaatcgtcaacatgaacaaatcttgttcagtttgtagacttggtggaatcgggaaataatcggtcgcttcttcaaccgctaaaatgggcgccccagctgtaacaacaccgagaaccggaatcttcttctgtgatgcaccaattgctgtcaaaccagctgctgttaattcaatggcacgtggtttagtcggatctttttgtaaaaagccttttttctcaaggcgtgctaaatggccatgaacggtagaagtagaggataaattaacggcttcgcaaatttcacgaaccgttggcggataacctttatcttgaacgcggtcatggataaaacgcaagacctctaattgtttggattctgttctcgtcataagagcacctcatttgttctaatagctatatgttagcatacctatagcgggatttcaaacaagcgttcgtgttttttgacattttacggattttagtccaaaatagacaaatagtttgaattggagggcaacaagatggcaatggatcaaaaacgattagaccgaattaatgaattagcacacaaagcaaaagctgaaggactaactgaagctgaaacagcagaacgtcaaacactgcgcgatgcctatttaaaggacttccgcgaaagtttccgctcacaagttgagatgctacaagtgtatgacaaagaaggtaaggaagtcactcctgaaaaagtgaaggatatccaacgggaaaaaggcttgcgtgacgattaatcttagaattccgctttctttttaggttaattatgtgtaaactatttaagtgaactgaattaggaaggggtgcataagatatgggattaggcattttattatttgtcattggggctttattaggcgcagtcgctggtttctttggcgcacgtgcttacatgaagaagtatttccaagacaatccaccaattaacgaagaaatgttaaaggctatgatgatgcaaatgggtcaaaaaccatctgaaaagaaattaaatcagatgatgagctcaatgaaagcacaacaaaaacgtagcaacaaaaaataaaacagtcaagtcggttttaaaagggtttctaacgaacaagtcgtttgttagaagctctttttttatcataataagaacggaaatacaaatgattgtccggcttaattaagattgttataataggacttatcgaattttagaggataggagcacaacatgggaatttttaaaaaactagggtggtattttaaacaagaataccgccgctatttatggggcgtcatctttttagtcctcgtggcgattgtccaaattgtgccaccaaaagtgattgggaccctggttgatttaatggacgccaaacaattaacggcccaaaaattaatcatgtggctcggcgtcttgttaagcgcagcgattttacaatatatttttcgctatggttggcggacccggatttggggtggcgcggctaaactggaacggacattgcggagtcgattgttctggcatttcatgaagatggacacgaccttcttccaaaaacatcggacaggtgacttgatggcacatgccacgaatgatttaaccgcgattcaacaagtggctggtgccggtattttaacctttgccgattcaatcatcactggtgggacaacgattattgcgatggtgattttcgttgactggcgcttaacgttgatggccttgattccaatgcccttgttggccgttgcgtcacgacggttaggtgcacatttacacacagcgtttgggcaatcacaggcggctttttcacggttgaatgataaaacccaagagagtgtctctgggattaaagtcttaaaaacgtttggccaagaagaagctgatattaaagatttcaacgagattgtcacgaagacaattgcgattaataaacgtgtgaatatgattgatggtttatttgatcccgccatcagtttgattatcgggttaacgtacattgtaacaatcatttatggcgggacgttggttatgaatcacagcatttcgattggtcaattgatttcgttcattagttatatcgcggcgcttgtttggccaatgtttgcgattgggcgcttgttcaacgtcttggaacggggcaatgcgagttatgatcgggttgatcaacttttgaaagaaaccagcaccattgtcgaagcaccggatgcgattcaaacactagcaactggcgatattcattatgctgttcaaaaatttacgtaccctggcgacaaacaaccaacgctcaaacaggtggcgttcactctgccacaaggtaaaacgttgggcattgtcggaaaagttggttcgggtaaaaccacactgattaaattattattgcgtgaatatgatcagtatcaaggcgagattcaaattgatggtcacgatatccgggattattcgctggatgcgttacttgatagtatcggctatgtgccacaagataatttcttattttcaacggatgtccgcgacaatattcggtttgctgattttgaccgaaatcaagcggcggttgaaaatgccgcgatttcgagtgcggtgcatgatgatattttaacgtttgtccaaggttatgaaacggtcgttggtgaacgcggtgtgtcgttatctggtgggcaaaaacaacgaattgcgattgcgcgagcgattatgactgatccagaaattctgatcttagatgattcgctatcagccgttgatgcaaagactgaagaagcgattttaatgaatttgaaaacgatgcgggctgatcaaaccaccattatcactgctaatcgcttgagtagtgtgatgcacgccgatgaaatcattgtcatggatgacggtcaaatcaccgaacgtgggacacacgaagcactccttgccgcagatggttggtacgcagagatgtggttgaagcaacaattaagtcaagccttaggaggtgcataagatggccaagcaatatcaatcagaatggtccaagaaagttccattgaaagagcaattgcacatcatgaaacgcctctttggttatacgaaacgctataaacgccaatttatcggcgcaattgtggccgccgcaggtttagcgaccatcaatattttattaccacgattactacaagtctttatggatcgttacttaaccaatcagagtgcgaccacccaagttttaatgggggttgcggcgttgtacggtttaggcgtgattctcaaagccattacacaatttttccaatctttcctttttggaatgggttcggaacgcgcgatggaagatgtccggcgcgatttattccagaagctccatcaactcgggatgcgttatttcgatcagacgccggcaggttcaattgtctcacgagtcacgaatgatacgatgaccttgattgattattggaatgttttcttatccttgttagtcggttcattttcaatcatttcagcgttcattgcgatgtggttaatttcaccaaaaattgcccttgcaacggcagcgtttctaccaatattgttaattgttatctggtattacagtagttacagtgcgcgggtttaccggcatatgcgtgaaaaattgagtcagttgaatacgaaactcaacgaatcaatcgaagggattacgattatccaacaattccgccaggaaaaacggttgaccgacgaattcgaacaagttaacgcggactatttaaaaacgcgcgaagcgatgattcgaacgaactcgttgttgctcgcaccaattgtgaatttactctatacactggcattggtcgttgtcttgagcttgtttggtgtctcagccctgcatagctttgtcacggcgggtttggtttatgcgttcacaacctatgttgggaacttctttaatccgatgaccaatatgatggattctttatcatcattacaagatggaatggtcgctggtcgccgaattttcagaattctcgatcaagaagaatatgcgccagctcaaaatgccgatgctgcaaatgaaattactgagggtcgcgtcgaattcaagcatgtttcgttttcatacgatgggaaaaatgaaattttgcatgacatctcatttgttgttgaacctggacaaactgtcgccttagttgggcataccggttctgggaaaagttcaattattaatgtcatgatgcggttctatgaattttatgaaggtcagattctaatcgacggacatgatattcggagttttcagacagcagaactgcgccgcaagatggggcttgttctacaagatgcattcatgttttatggtgatgtcgcatcaaatattcgattatttaatcaagagattacagatgcccaaattcgcgcagcggctgaattcgtgcaagctgatgactttatcgaacaattacctggtcaatatcatgctcgtgtaattgaaggtggcgcccaattttcaagtggacaacgccaattaatttcgtttgcgcgaacattggttacaaatcctaaaatcttggtcttggacgaagcgacggctaatatcgatacggaaacggaatcgatgattcaaactggtctcgctcggttacgtcaaggacgtacaagtattgccatcgcgcaccgtctatcgacgattcgcgatgctgaattaatcttggttttagatcaagggcagattgtcgaacggggtaatcatgatagcttagtggctcaaaaaggacgttattatgaaatgtatcaactccaaaatggtggcagtgaagaataagcagtttcaaaaaaagacacgactattattattgcggagtaaatcgggaggaatttagcacatgaagaaaagacgctggctgaaatggtcgttaattagcgttgttgtcttagtggtggtagcactatttggtgccactatgtatatgtatcaatacgcatttgtaccggggcaaaaatcatttttaaatggtggtaagccaacgaaagtctatcaagacaatcaacgttggttaaaaaatgttaaacaatcaaagtggcatcaacaatctgccacagatgatttaaaattggcggcaatttatgtgccagcaacaaaacctacgaacaaaacaattttagttgcgcacggctatatgggtaaaaaagaggatatggcacgctatattcacatgtatcacgatcttggctacaacgttctcgcgccggatgaccgtgcagcaggtgaatcggaaggcgatgccattggctatggttggacggatcgcttggattacgtcaagtgggcccaaaaaattgtcgctaccaacggacaggatagtcaaattgcccttttcggggtcagcatgggtggcgcgaccgtcatgtttaccgcgggtgaagaattacctaagcaggtgaaagcggtgattgaagattgtgggtataatagcattgctgacgaactcgcataccaactaaacgatctctttggattgccgaaattcccgttattttacacaacgaattggatggcacgggttcgcgccggctataactttaatgatggcgatactgctaagagtttagctaactcgaaattgccaatcttcatgatccatggcgatcaagataaatttgtaccaaccaaaatggtgtatacaaattacaaagcggcgcatgcgcctaaacaactctgggtggttccgggggcagctcatggtgaagccttggctacagatccaacaacctatcgtaataaagttgcgcaatttttaaatgaatatcttcaataagtctgtttaattgtattttgaagtcgatttggtgtgatagatatataaatatattgatatcgctaatccgttaggtgaggctcctatatgaacaaacgctgctactcagaaacatcgagagatgccaattgagtcaacagaaactgccctgaaggctttttctaatgtagctgaacaaagttctacgtcatatagtgctaaagctcaacgattggaatggcttgtttttcttgtgaggcatcctttctttgaggatgccttttttatgcggatcagctgcgaatgagagggattacgatggctaagacaattaaaatgacactcaatcagattaatcaattaacgccaaaagcgagtttagaacatttcgaaactgacaagaaggggttatcacggcagcaacgaacagcacggttacaaacctatggggaaaatacgattcaaaagcggcaacagcgttcgttattgcgagctagttggcagagcgtgcaagatccgtttatcggcgtattagccgtcttaatgatcatctcctggctcagtcgagatattgatggcgcgatagttatgttaatcatgattgttgtgtctagtagcattcgattcgtgcaagagcgcaagtccgagcaagcgagcattgctttacaagcgatgttggcaaagaccagccgggttgtaattgagggtcaaccaactgaagttgccgcacaaagtctggtacctggggatattgtgcagctgcagacgggggatttggtgaatgctgatttaaaaattctggcgagccatgatttacaaattaatcaatcttctttgacgggtgaatcaaaacccgtgagcaaacgcataacagcgcaagcaactgacgtaacgaatgcggcggatatggcgagtttattgctgatgggtagcaccgttgtcaatgggcaagctaccgcgttagtgattgccacgggtcaagcgacttgctttagcgcaattgtgactactgaacctaagtcgcgaccgaatcaatttgatgcagggttaaaacacatcagttggttattaattcgcatgatgctcgttttggtgccctttgtatttgtgattaatggtgtgactaagggagattggcaacagtcgtttttctttgcgatggcagtggcagttggtttgacaccggagatgttaccgatgatcgtcaatagtaatctggcgaaaggcagtgtcgttttaagtcaacaacaggtcatcgtaaagcagttaaaggccattcagaatctcggggcgatgtcggttttatgtacggataaaacggggacgttgacggaagatcatattaaattgatgtactatgcagatattttaggaaagcgggatgtgcaagttttgcgattagcatatttgaacgccaagggtcaatccggctggcagaaccttctggatgaagcgattattcattactatgaacaagaccaaaccaatgatgactttccatattaaaaattgggcgagattccatttaatttcgagcggcggctaacggtctggctcaaaaaccatgcaggtaatcaattagtgccaaaaggggcctttgaagaagtgctagcaacgtgttcccaagtcaggttagcggatcagattgagccgttgactgaagtgcaaaagcagaacctagtggcagtgcatgatcgtttggcacaacaagggatgcggatgctggcggttgcttatcaagatgagttagcagagacggcatcaattgaccgcgttggtaatcaaggtttgattttcgccggctttttggacccaccaaaacaatcagctatctcggcaattcaacaactacaagctcatcaagtggcggtcaaaattttaacgggtgacagtgctttaacgacgcagcaagttgcccaaaaagtgggcattcaggatctagctgtgaccactggtgagatgttagagacgttaacggatgcacaagtcagtgagctattaaccgagcaagcattatttgccaaattggctccacttcaaaaagcgcgtttaatccgtttattacaagcacaaggggaagtcgtcggtttcatgggcgatggcattaatgatacgacagctttgaaacaagcagatgtcgggatttcagttgataatgccgcagacctcacaaaggatgctagcgatgtaatcctactggaaaaagatttgaacgttttagaacacggggtgcttgaaggacggagagtctttatcaatatgtataagtacattcggattacgttagcttctaatctaggaaatgttttgagcgtgctggttgccagcatctgtttaccatttttaccaatgttgtcactgcaaattcttgtccagaatttactgtatgatgtcgcacaactctggttaccttgggatcgggttgctgaagatcaattgcgccaaccaacacagtgggcaactaaaggcttactgaagagtgcgtttattctaggaccgttgagctcaatggttgatatcttaacgtttgcgattctctggtttggatttggcctgcaaacatcagctcaacagggggctttccaagcgagttggttcgtcgttggtttattgacgcagatgctagtggtttatgtattacggacaccagcatcaccgttcaaggatcgcgcaaattggcgtgtttacttggggagtttaatcagtttgttaattggaggtattctggtattgacatcgctcagacaagccgttgatttccaagcgattccaacacaatttggctggattgcagtggcattagttacggcctatctattggtgacgaatgcggttaagaatttaacgcgctaaaaaaactgctagatgatatcatctagcagttttttgttattattttttatcaggtagttcatatttaaaatcagggttaatttcgtggtcaatttgatcaaatgcggcttgcatttgatgattgacaacttctaagttttcttcgttgagttttaatttcggatcgattgggattggttcaccaaaacgaatcgtaatctttttccgttttaaaacatcagagaattttaatggcccttggtagactgctggtacgagtgggacccgcgccatcttggcaattacgaccgcgccgcctttaagttcgcttgaatagcgactaccagtggggaacatgattaacgaaagttcttttgagcggagggctttcactggtgttttaatcgccgatgggccaggatttgttcggttcacaggaaatgcgtttgcgtgggttaagatgaagcgtagaattgggtttttaaagagttcttctttggccatgaacgtgaactttcggggactagcagcaagtgcgaagaagattggatcccaccaagttcggtgcgggccaactaaaacataagtcccttcaggcagggcttctttattttcgaccttcaaattgccattcaataaccaggctaaaatgcggacgataaaacgtgcaaatgagaaaaacatagtttagattcctttcaaacgtgactagtatctgctcattataccaaataatgatactctttgttataatatgcctaaatacaaatgaggttgaaggtagaacgatgttaaaagcagatgagcgaattgaccaattatttcgcttagatattcagattattcaaagcccatccgtcttttcctattcgatggatgcggtgttgttagccgacttttcccagttaccaaaacgcgggacgattgtcgatttgtgcgcaggcaatggggcggttggattattcatgagtcccaaaacaaatggtcaaattatcggtgttgaacttcaagaacggttggccgacatggcacaacggtcaattgaattaaatgacttaaccgaccaggtgacaatgctcaatatggatttgaaagacgttaacactaagattcataaggacagcgtcgatattgtgacctgtaatccaccatattttaaggttgaacccaatagtcaaaaaaatcccaatcaacatctggcactggcgcggcatgagattgcaacggacttacgcactgtggttcaaaccatgagtggcctgttaaagatgaatggtaaagggtatttagtccaccgtcccgaacggttcttagaaatctgtgacgaactacgcgccgcacgcatggaacccaaacgcgtccggtttgtttatcccaaagcaggcaaagaagcgaatatggtgttaattgaagcggtcaaagatggtaaaaaagggggcttacgaatgcttccggaactgacgatttatgaccaagacagccactatacaccagagatgcgcacgaagttattcatggctgacaatgactgagaaggcttattatttttacgtattagtctgcgccgatcatagtttttatggggggttcacgaccgacgttaccaaacgcgttgccacgcacaatgctggcaaaggtgcgaagtacacaaaattgcgccgaccagtgcggttattatattttgaaacgtttagtgataaatcggcggcgcttaaagcagagtatgcgttcaaacatcaaccccgccgcaaaaaagaacaatatttaatggaacatggcatttcaagaactcaattttagaatggagagaccaatatgcaacctaagttagttgtcgatcaacacattcatttacaacctgtgacggaagcggatgcgccggcgttatttcagttagtggatcaaaatcgcgtcaatctcgatacttggttaccatgggtgggcgatatcgaatcagtggccgatgaacttggctttttaaaatatgcgcaacaacaaatggcaaaccaggaactttggatggcaacgatttgggatgaccaccagttagttggtacgattgatgtccacaatattgacgacttgaatcgtgcgggtgaagttggctattggttagatgaagctttccgcggacgaggtgtcatgcatcgcgcactagccgccattgaacaatacgcggccagtgaattggaacttgaccagttgagtatcattgctgcacacgaaaacgtggcgagtcagcaagtcgcgctaaaagcgggctatcgagcggttgaaacagtgagtggcgttacctcagtgagccaccaaccacaagatgcaacccgttatcagaaacaattgggcggcatgtaagttcttgttgacgcgccttgttatttttagtatacttttaaacggtatttcaataccaaaaaataattcacactggttgatttctagagaggtgcttggcgacaagttctctaaaaaagtgaaaccagtggtcgaaaaaaaccatatggaggtctgttgacatggctgtattgtcaatgaaacaattattagaagcgggtgttcacttcggtcaccaaacacgtcgttggaacccaaaaatgaagaaatttatctttactgaaagaaatggtatctacatcatcgacttgcaaaagacagttcgcatggttgacgatgcttatgacttcgttaaagaagaagctgctaacgaaggtgtattcttattcgttggtactaagaaacaagcacaagatgcaattgctgaagaatcagtacgtgcaggccaatactttgtaaaccaccgttggttaggtgggactttgactaactgggacacaatccaaaaacggatcaaacgtcttaaagaaatcaaagcaatggacgaagatggtacattcgatcgtttacctaagaaagaagttgccttgttgaagaaacaacaagaaaaacttgaaaaattcttaggcggtatcgaagatatgcctcgcatcccagacgtaatgttcgttgttgatcctcgtaaagaacgcattgctatcaaggaagcacaaaaattaaatatcccagtcgttgctatggttgatactaactcagatcctgatgatattgatgttattatcccatcaaacgatgacgctatccgcgctgttcgtttaatcacagctaaaatggctgatgctatcatcgaaggccgtcaaggtgaagatgatgttgaagaagctacatttgctgcagaaaacaaatcagcagactcaatggaagaaatcgttgaagcagttgaaggcgacaacgatactaacactgacgctaaatagtagattcaaataagctgtcttagaggtttcgcaaatactgcctgacttgtgggacagctttttttaaaccaattatattgaatataaattgtcggaggtatgaattatggctgaaattaaagctgctcaagtaatggaattacgtaagaaaactggcgttgggatcatggacgctaaaaaagcccttgtagaaagtaacggcgacgttgctcaagcaatcgatgctttacgtgaaaaagggatggcaaaggctgctaagaagagcgaccgcattgctgctgaaggtttagcaggcatcgccatcgatggtaacactgctgcaatcgttgaagtgaactcagaaactgacttcgttgcttcaaacgatcaattcaaagctttattgaaagatattgctgaaacaatcgctaaaaacaaaccagctgacatggcagctgcagaagcattaccaatgggcgaaggcacaattgctagctcagtaatcaacttaactgctgttatcggcgaaaagatcagcttccgtcgtttcgaattagttgaaaaaaatgatggcgatcactttggcgcatacctacacaatggtggccaaatcgcttcattagttactttagaaggtgctgacgatgaagcagctcatgacgttgcaatgcacgtttcagctgttaaccctcaatacgtttctcgtgaagatgttcctgctgaaacattggatcacgaacgtgaagtattaactgaagaaacaaagaacgaaggcaaaccagaaaacatcattcctaagatcgttgaaggccgtgttaacaagttcttgtcagaaatcagcttgaacgaccaagctttcatcaaagactcagatcaaactgttgcacaatttgttgcatctaagaacggtagcgttaaaggtttcgttcgtttcacagttggtgaagggatcgagaaaaaagaaaataactttgttgatgaagtcatgggccaaatcaaataagcttattttgcttcaaaaagggaacgcaatttgcgctccttttttttgcagttttacgataattcagaatcgcatacccaaataacttattaaatatggtaaaatgagcctagtaatcaacggagggatatcaaacatgtcaaatacaaaatacaaacgcatcgtcttaaaagtgagtggtgaagcacttgctggcgaccaaggtttcggaattaaccctgaaattgttaaagtagtcgcaaacgaaatcaaatcagttcacgatttaggggttcaaattgccattgtctgtggcggtgggaacatctggcgtggtgtgactggtgaacaaatgggcatggaacgtgcgcaagccgattatatgggcatgatggcaacggtcatgaatgctttagctttacaagataacttagagagcattggtgtcccaacgcgtgtgcaaacatcaattgaaatgcgtcaaatcgcagaaccttatatccgtcggaaggctgttcgtcatttagaaaaaggccgcgttgtgatttttgctggtgggacagggaacccttacttctcaacagatacaacggctgcattacgagctgctgaaattgatgcagatgtgatcttgatggctaagaacaacgttgatggtgtttactctgctgatcctaacactgattcaagtgccgttaaattcgacacattaacacatttagatattatcaacaaaggcttgcaagtgatggattcaactgcaagtactttatcaatggacaatgatatcccattggtagtcttcaacttaaacgaaccaaacaatatcaaaaaagttgttgaaggtgccaacatcgggacaacgatcgaaggaggagaataatatggcaaatccaattttagatgaagcaaaagcaagcatggaaaaagcagaagcttcattacaaagaacattaggccaaattcgtgctggtcgcgcgaatgcaagcttggtcaaccgcgtgaatgttgagtattacggtgcaatgacaccacttaaccaaatcgccgcaattacagtcccagaagcacgggtcttgttgattaccccttatgacaagggtgcgcttgaagatatcgaaaaagctctttatacagctgatttagggatttcaccagccaacgatggctcagtaatccgtttagtaattccacaattaactggtgaacgtcggaaggaaattgctaaagaagttggtaaagaagctgaaatcggcaaagttgccatcagaaatgcacgtcgtgatgcaatggacagcttgaaaaaagctgaaaaagcaagcgagattagtgaagatgaaatgcatgatttagaagaacaagttcaaaaattgacgaatgaagcaacgaagaagattgacgaaatcgccaagaacaaagaaaaagaaatcacagaaggttaatccctaatggatgcaaaaagccccgccacaacagtggcggggctttttttgcgttaatgaataattttactcttcgtcgcttctttgtggagtttttcaaagaatggattgattcgatctttcaggaagaggccaattaggaagaaaacaaccgcaaagagcgctaggatgataaagttatgccagaggttcggtgcgtaaatcccaccagttggttcgcgtaagaggttgaccccgtatgtgaacggtaaaatggggttaataaactggaagaattgatcggagaggacaactgggaagttcccgccaccgccagagatggaaagcaccaagacaatcatcgcaattcctttaccaacgttcccgaacatcgcggcgagaacgtaaacaattgtcatgaagaccatgctcaggaagacggctaataagattagcggtagtttatcaacgatgtaggccttcaataagaaaatattaccaagcgtcacaatcacggcttgggcgacaccaatgacgatgtaggttagccagcgagcaataaattgctgtttcttagtgtactgtttcttttgtttgtcgtctaacgcgaagttggttaagacgatgttactcaaaagaagtgcaccaacccagagacaaagggctgtgtagaacggcgcacttgctgagccataggtcttaatcgggtagacgtgtttttctttcagttcaaccggtttggctaagaaattactttccttagttgcatcgcggcgaagcaatttaatcagatctttgagatcgaccgtcttttgttgtttgcgaatcgcctcagcgcctttttggatcccgctacgtaagaatggccaatcattgttgatgaggtcggtcgcatcatttaaggcggttttaacgagtgggaatttctcgttggccatgttgagcgtcgttgttaagtcgttttcgatgcctggtaagtcattgttgatgaaactggttgccagttgcagtttatttttgagtagtgggtagtcattctggtaaacgtcagaagcggtgtttaatccagagataatcgtgcccagattgccatttaataatgtattcgcgtcatgaatttcttgtttcaacgctggtaactgctgagcatatttttgcagatagtcgatggcttgttggagcgtcttttgtgtgttgaataagagtgcggggagtttcggtaaaacttcgccgttaagctgtgttaagacggcgttaccgctagcaattaatgttgaaaagcggtcgagcatatttttgacgctgtcaccgatatgggccgcttgaatcttagcgacgctgtcttcgacttggtcggcgtattgaatcaaaccattaatcttggtttgcaaatcgtcaattgataaatcatcgtaatgggcgagaaggtcatcaacttggcctttaaaaacgccgagttgggtcgccaacgtatttaaatgtttaatcggtgtatcaagtgcatgtgattccggttgaccattcgccactgctgactgattgtagctgtcttgcaagttttggagggttgtcgcaagttgagtcgcatgggtttgcaaggtagcggtgtgatcagataagttctggagcgcttctttgagcgcttgcttgagttcagcattattgggatcctctttgagttgactcagcaaactattgacggccgttaaattagttgaaatgttagttgccaattgattggtaatggctaacccttgatccaccgttttttgaatgaccggtaaagcagcttggagtttagggattaggtctgattgtaattgacccgcgacaccttgggccgtttggctaaaagtcattaagtccggtaagactttttgtgttttgtttaacacatctaaaccagtttgagcttcgttaatgccgttcgttaaagtattggcgatgccatcgaaatcagaatcgagtgtggcaacttgtttgccagcactttggatttctggaatcttagcctgaactttcgttgcgagctgaccggctgcttcaacttgtggtaagtattgattgatgccgactactttttgcgccatggcatttgcttgtggtaaaaaggccgcgaactcgttggcttgggcaagctttaatgccatttccggtagtttcttttgtagattaagcacttgttctgcgtattggttaatttctggaatttgttggtctgttttgagaatgaggctcgagaaacgattaatgacggggagatttgtattgagatcaatcccggccttgtttagggtactcatcaatgttttaccaacggttgagacgaattcttctgaaatggtggactgaagcgtagttgcacctgcactggtaattttaggcgcaatcgcgttaatcttatcattagatgagtagactatctttggcttttgaatcttgccatcgacgaaactaacgagatcctttgagaagtttttgggcacgtaaatcccggcgtagtatttccccgtttttacgccgtcatctaattcttttttgctcgaagtaaattgccagcctaatttgtcgtttttctttaattggctaattagttcggcgccaatctcgacttttttgtcagcaatgacaacactttgatcggctgagtaaacagcgacttttaagtcttgcgttttactataagggtcccataacgcccagatattaaaccacgcgtagagcgatggaatgataatgagggcaataattaatagaagagcgatcgggcttttgaagattcgacgccaatcaagtcgaaagagttcgaaggtttttcgcataataaactccctttttctgtttaaggtatgtatcagtttatcatatttaacctgttacatgccaataactataggaatctactaatatttaacaataaatttcaatgtgatagcggcaacagtacgttgtggcgggaatcgttggtattaaaggcttaatcgtggataaaaatcatctgggaagaactcaaaaagcgcagaatgggcggttcagtttgtacaatgccggtgacaatcggttgattttaaatagtcacttcctgtgatttttggtacaatcatatgagagttattgaaactggaggagtatgtggtgtttacaaataaaaaaacagacgcacaacaactagatcccaccaacatccccaaccacgttgccatcatcatggatggtaacggtcggtgggcgaagaaacgcttaatgccaagaatcgctgggcataaagcaggaatggaaaacgttaagacgattaccaaaacggccagtcgaatgggtgttaaagtcttaacgttgtacgctttttcaactgaaaactggaagcgtccaaatgacgaagtgaacttcttgatgcagttaccggtcgatttttttgatacgttcatgccggaattgattgctgaaaacgtccgtgtgaaagtcatgggtaatattcaagaattaccagaaaagacgcaaaaagcggctaacaatgcgatggccgatacggctgataacacagggatgattttgaactttgcactcaattatgggtcgcgtgacgaaatccaacaagcggttaagcagattgctaaagatgcggtaaatggtacaattgaggtcgatgcaatcgacgatgcgttgattagtgattacttgatgactggctttttaggggaatatgctgacccagaattattgattcggacgagtggcgaagagcgaatttcgaacttcttactctggcaaattgcttacagcgaacttgttttcgtagatgaattctggccagactttaccccagcagtgtttgaacgctcagtcggcgcttaccaaaaacgtaatcgtcgttttggcggtcttaaataggaggaaatacaattatgaaacaacgtgtcattacagcaacaattgctttaatcatctttatccccatcattttctttggtggtatttacattgatatcgcggcagccgttttagcactcgttgccttatcagaagttttcatcatgcgtaaacgaattattgtctcacctgatgcaaccattgccggactagcggtgttaagtttagcctcacccaaaggcgcctttaactggttaccagcaggtgtgtcacaatttgatttattctacttcttcgttgccattttattagccatcacagtcttcacgaaaaaccgggttaacttcgatgatatgggtgtcacaaccttagccagtctctatatcggcttaggcttccattatttagccgcaacgcgaaatattggtggttttgacacggtgatgtatatcttattggtcatctggatgacagatatcggtgcctacacattcggacggatgtttggtaagaataaaatgtggccagctatcagccccaataaaacttgggaaggttcaattggcgggacattatcagcattagtggtcgcagctatttatttaaacttcttcccacaagcttattcaatgcctgtcatgttaggtttaacgttgatcttctcaattgccggtcaattaggcgatttagtcgaatcagcttacaaacgctattatggcgttaaagactcaggtaaaatcttaccaggtcacggcggcatcttagatcgctttgacagcatgttgtttgtcttaccgctactacacttgtttggcatgatttagagtgcgtttgtggcggttagcaactgagcattaatacaaaaattcgaataatcccggttttaggattatttgaaattttagattaagcggaagttgttgcaaccaaaaagcacgtttttaaaagtcaatattatctagcgtttagcgcaactttttggtttgcgctaaacgcttttcttgtttctaaggaattcgtgatataatataacagttcatatcaaatgagagtattgaaatacgcatttagaagggagtcgtactctattggcggcgattattgcgtttattatcatatttggcattttagtagtggtgcatgaatttggccacttttacatggcgaaacgttctggtattttggtgcgtgaattttcaattggcatggggcccaaattatttgcaacgcgcaaaaatggcacgacttatacgattcgttggttaccacttggcggctatgtccgcatggcggggatggcggatgatgaatctgaaatcgaagccggcacgcaagcaaccttgctgttagacgaacaagaaactgttcaaaaaattaatacaagtgacaaagtaaccacgttaaacggtgtcccatttcaaattgcaaaaactgacttgcaaaaagaattatggattgaaggctatgaaagtggtgacgaatccgaattaaagcgttattcggtcagtcacgatgcaacgattgttgaatcagacggaacggaagtgcaaatcgcacccgtggatgttcaattccagtcggctagtttaatcaatcggatgttgaccaacttcgcagggccgttcaacaactttatccttgcgattgtggcgtttgcgctctttgcttttttaaacggtggcgtcccacaaaacaaagcgattgttggcacagtgatgccaaactcgccagcacaaaaagccgggcttaaaacggatgaccggttagtgaaagttgctggcaaaaaagtcacgacgtttactgatttcagctcggtgattgcaaaatatccgaataaaccagtgaatgtccaggttaaacgggcaaagcaaactaagtcactcgaaatcacacctaaagcggtgaaagtcgaggggcaaaaggggaaagtcggccaaattggtgtgacagctggactcaaccatagcgtgggggctaagttgaaatatggcttcacccaatcatgggcgaatgcgacccagatttttaaaattctcgggtcattcttaacgggtggtttctcactcaataaactagccggaccagtcggcatgtattcaatgacgacccaattcgcgagtcaaggctttacaatgctcgtctacttcttagcgttcttatccgtcaacttggggattatgaacctgattccaattccggccctcgatggtggtaagctcgtgatcaacgtgattgaagcgattcgcggtaaacccatctcaccggaaaaagaaggcattgtcacccttgtcggggtcggcatgatggtcgtcttaatggtcttggtcacatggaacgatattcaacgctttttcttttagattatttttggaggtataacagattatgaaacagtcaaaattatttatcccaactttaaaggaagtgcctaactcggccgaggctaagagccatcggatgatgttacgggccggctatattcaccaagtatctgctggtgtttacagttacttacctttagcattccgcgtcttggaaaacatccaagccatcatcaaagatgaaatgagcaagattgacgccgttcaaatgcaaatgccagggattttacctgctgaattgtgggaagaatcaggtcgttacgaaacctatggcgataacttattcaagttcaaggaccgtcatggccgcgacttcatcttaggcccaacacacgaagaaactttcgctgacttggtgcgcaatgaaattaagtcatacaaaaaattaccattaacgttatatcaaatccaaacgaagtatcgtgacgaagatcgtccacgttacggtttattacgcggccgtgaattcatcatgcaagatgcttattcattttcagccaatgaaactgatttggatacaactttccgccaaatgtaccaagcttacaccaacatttttgaacgctgtgggttagacttccgcgcaatcgttggggatgccggtgccatgggtggtaaggattcaatggaattttctgcgattgctgaaattggggaagatacgattgtttattcagaccaaagtgattatgctgccaaccttgaaatggcaacgagtgtccgtcctaagcaaaactcaagtgatgtgcaattagagcttgaaaaagtagcgactggcgatgcccacacaattgaagaagtggctgctaaattagacgtcccagcgcaacaaatcatcaagagtgttctctttatcgctgacgaccaaccggtcttggtcttagtgcgtggcgattttgaagttaatgatgtgaagttgaagaacttcttagatgctgatttcttagaaatggcaaccccagaacaagtcttagcaacaatgaacgcaccaatgggttcaatcggaccagttaacgcgccagaagacttacaaatcgttgctgattacagtgtcgaagccatggtgaatgccgtggttggggcgaatgaagccgatcaccatttcacgaatgtcaacagcaagcgcgactttaccgtagctgattattcagacctacgtttcgttcaagaaggcgaaacatcacctgatggtcaagggaacttgcactttacaaaggggattgaaattgggcatatcttcaaactaggcacacgttacactgaacaattcggtgccactttcttagatgaaaatggccgtgcgaaaccaattatcatgggttcttacggaatcggtgtgagtcgcctcttatcagcgattacggaacaacaagctgacgaaaacggcttagtttggccaagcgcgattgccccttatgacttgcatgtcgtaccggtcaatgtcaaagatgctgaccaagtcttattagctgaacagatcgaaaacttacttgaagaagcaggttactcagtcttagttgatgatcgtaaagaacgggctggcgttaagtttgccgacagtgacttaatcggcttaccaatccgcatcacagttggtaaaaaagcagcagaggaaatcgtcgaagttaaattacgtaagacgggtgaaaccctagaagtgaagaaggatgaattgattaattcattaagtatcctattggcttcagagacaacagaagctgaatagagtgcgttcaagctcggtcaacttttgagcattagcacagggaagcgaattaacgacgcagtcgataatttgattcccagcgctaagcgcagaaagttagcttgaaaagcacgtttaggaatagagtgcgtttgaaaccgtttggctccaagcattaacttaaattcgtgaatgagcgacaacgtcgatcgttcgcggattgtagttaagcgcaagaggcagtttcaaaaagcacgtttacattataaatgttcggacatctaaaaagggctgagacagaatgatatttgtcctagccccttttatttaactttctgaatatgaggaggcccttttgtggcattagatcaaaccgcactgtttcaaaaattattagaacaaattgatttacccgcggatgttgcgaattatcctggcttcaaaactggccaagtagaacaagtcgttgtccacgaaacatccaaacgctggacttttaaattacatttcgaatccgttttgccatatgctgtttacacaacgtttgaacagtatctagaagcagcattcaaagcgattgcgggtgtttcagtggaaatcaccaccgatgcaactgaattggacggcggtgttttagcagcttattgggaatacgtcattaaccatagtgggattcaatcttcaatgttgcacgaattgtgtgaaaaagagaccccctatatcgacggtcgcaacgtctttttagttgtcgaaaacgacatcgtgaagacgttcttcttaaatcaagcgcaaacgacaatccaagctggttatcaacggcttggttttcccaagtttgcgattcaacccttgattgacgaatccgcctcacaaaaggcaatcgaagattttcaagcgaagaaggctgaacaagatgcagcccgcgcacaagcggcagccgaagcgatcaagaaaaatgaagcactcaaagaaaaacgtcaatcagaaggcaaaccagtcgatggcccgatttcaatgggccgcggcttaaatcctgctgaaccaacccgtcagatgattacaatcaatgaagaagaacgttccgttgtcattgaagggttcgtctttgataaagaagtccgcgttttacgttctggccgccagctcttgattttgaagatgacagattactcatcatcatttacggtcaagaaattctcccgggataacggcgacgaaagtatcttcgcagccatcgataaaggcatgtggttcaaggtgcgcgggagtgttcaagaagataacttcatgcgcgatctcgtggtcaatgccaatgatttggtcgaagttagccatcccaaacgccaagataccgctgaaaatggcaagcgcgtcgaactgcatttgcacaccaatatgtcacaaatggatgcgaccaacaagattggcgacttcgttcaacaagccgctaaatggggccaatccgcgattgcggtgaccgatcattataacttacaagctttcccagatgcttatgcagcagggaagaagaacggcgttaagattttgtacggtgtcgaagtcaatttagtcaacgatggcacgccagtcgcgtataacttgcgcgatgaagcactcgaccatgctgaatacgtgattttcgatgtggaaacgactggattgtcagccgtttacgattcgattatcgaattggccgctgtcaaaatgaaagatggcgaagtgattggctcgttcgatgaatttattgatcccggtcacccgctatcagctttcaccacgcaattgacgagtatcaccaatgaaatggtgcacggtgctaagaaagaagccgaagtcctagcgttgttcaaagaattcgcgggcgatgctgtcttagctgggcataacgtcacgtttgatatgggctttatcaatgctggctatggtcgtaacgacctcggtcagattgaaaatcccgtcatcgatacgttggaagtttctcggatgcttcatccagaatacaaaaatcataaactcgatacgttaaccaagcggtataaaattaacttggaacaccatcatcgtgctaacgccgatgctgaatcaaccggttatttgttatacaaattagaagccgaagcggccgacatgtatgggatggtcaacgtcaatcaactgaatgatcgcgttgggattggcgatgcgtataaacaagcacggccagcgcatgcgattttaatggcgcaaacccaagctgggttgaagaacttatttaaactggtttcagcatcgatgaccgaatactattatcgcacgccgcgtttgccaaagagtcgcttggatgccttacgtgaaggcattctagtcggttcagcttgtgccagcggtgaagtcttcgaagcgatgatgcaaaaaggctaccaagaagcacgcgatcgcgcgaagtattacgattacctcgaagtaatgccaaaagccgtttacgcaccattattagaacgtgaattagttcgcgataatcgggcgcttgaagaaatcattcgcaacatggtcaaactcggtgctgaattggataaaccagtggttgcaactggggatacacattatttgaatccagaagattcaatctatcggaagattttgattcactcaatgggtggggctaatccattgaaccggtcacaattaccggatgttcatttccgatcaaccgatgaaatgttgacagcgttcaattttcttggtgccgatattgcccaagaactcgtggtgacgaacccgaaccaaatcgccgatatgattgatgaaatcacaccggtcaaagataagttgtacacgccgaagatggcgggtgccgaagatgaaattcaaaccttaacgatgaatcgtgcgcatgaattatacggggatgaactccctgaaatcgtgcaggcccgccttgataaggaattgaagagtatcatcgggaacgggttctccgttatctacctgatttcgcaaaagctcgtgtataagagtggtaaggatgggtacttggttggttcccgggggtccgttgggtcgagtttagtcgcaacgatgaccgggattaccgaagttaatccattgccgccacattatcgctgtcccaactgtcattactccgaattttataccaaaggggaagtcggttcgggttacgatttagccgataaggactgccctgaatgtgggacaccacttgataaagacggccatgatattccatttgaaaccttccttggcttccacggggataaagtgcccgatatcgatttgaacttctccggtgattaccaaccggttgcgcataactacaccaaagtcttgttcggggaaaataacgtgttccgcgctgggacgatcgggacggttgctgataaaactgcctacggctatgtcaaagcctacgaacgtgataccgaacaaactttccgcggcgcagaagtcgatcgtcttgccaaaggctcaacaggcgttaaacgaacgaccggtcaacatccggccggaatcattgttgtgccggattacatggacatctatgatttcacaccaatccaattcccagctgacgatcaagatgcagcctggaagacaacccattttgatttccattcgatccatgataatatcttaaaactcgatatcctgggccatgatgatccgaccatgatccggatgctgcaagatttatcggggattgatcccaagacgattccaaccgatgatcctggtgtgatggccttgttctccggcactgattcactcggggtaacgccagagcagattaattcgaaaatgggcacgctcggtgtaccagaattcgggacgcggtttgtccgcggaatgctcgaagaaacgcaccccacgacgttctcagaattactgcaaatttctggtctttctcatggaaccgacgtgtggttgggtaatgccgaagaactgattaacaaaggcgttgtcactctaaaagacgttatcggttgtcgtgataacatcatgatggatttaattcactggggtatggatgatagcatgtcgtttaacatcatggaacgggttcgtaagggtaaagggattccggatgactggcaacaagccatgcgcgacaacgaaaatgtgccagactggtacatcgattcctgcctaaaaattaagtacatgttccccaaggcccatgcgaccgcctatattctaatggcgttgcggattgcttacttcaaagtttacttcccaattatctattactgtgcttacttcagtgtgcgtgccgaagatttcgacctcgtggccatggcccaaggaaaagaaggcgtcaaggcccgcatgaaggaaatcaccgataaagggatggaagccagcgccaaggaaaagaatttgttgacggtcctcgaaatcgccaacgaatgtttggaacgtggcattaacatcaagatggtcgacattgaaaaatcagattcatctgacttcttgatccaagacgatcacaccttactcgcaccattccgcgccgtcccaagtttgggcggtaacgtcgccaaacaaatcgtttccgcccgcgaagaaaagccattcttatccaaagaagacttatccaaccgtgggaaagtttccaagacactgatcgaatacctaacagaaaataacgtattgaatgacctgcctgatgaaaatcagttatcgttgtttgatatgatgtaaaaaagccttcatactttcactgaaaataaattttcggagaagtatgaaggctttttattttgcacacattttatgcaattttaaaaaattacataaaatttgttgaataaacttttgattcgacgtatactaagcatattaaataagtgttgaaggaggatttaatggagaaacttagtaagtttgttgaatttgtgagtggctctccacaatctcgtctatttgtttcaatgaatgaaagtgatcccagttattgtatttatgggcaatctgaattgaaagctgatttagttcagtcagaaacatcgtccaatgagggacgtcaaattcggacccctgataaagttatgattttatcagaaggcgatattatttttaatttagtttctggagaagcaagtgttgttggaaaaaagcatgttggctatctacaaactcaaaattttattaaattaatccctaatcaggatttggatactcactatttagttttcttgttgaatcaggatcacaatattaaaagacagcttgtaagttcattacaaggaacgatggttattaaatatacacttgcacagctaaaagcgttgagaattaataaactaccaccaatagatgagcaacgattaattggaagaatgtatttcaaccaaatacgattaaactggtttagaaagcaaagtgcggatttaaaactaaaaatagcaatgaatcagttgcgaaaggactagtgaatgaacgaattaaatttcgaatcagaattaattaaatatattacaagtgggacaataacagtttctgaggatgattttcaaaaaagtaatattcgtgaaacagcaaaagattatgttgtgaagactaagctgtggcagtatcgagacgatattagaacaactgaacaactatgggctaattttaagcagattttagagcagcataatcaaaatacactcgataatccgctaagtgtcatggaatttaatcaggtgaagaaaatcatttcagatttaaaaacaccgtatgatgctggtcaatttttatatgggttaaatggtgtctctcagattgaaattgatttagatgatggtcggcatgtgtttttaaccgtttttgatcagaaacaaattggcgctggtaatacagtctatcaagtcgtcaatcaaattgaacgaccagcattactaactgggaagcaagaacggcggtttgacacaacattattaatcaatggcttaccaattattcaaattgaagagaaacgagattcacatgatgttaatgaagcacttaatcagatgcatcaatatattttagaaaatcaatacactgacattttttcaacattacagattctggtggcaattacgccgaataatgttaaatatatggccaatacaacggcagataaatttaacaaagatttcgcgtttaattggcaacgaaaatcagacaacaagattgtccgtaattggcgcgaatttgcagattcaatgctaagtatcccaatggcccatcaaatggcgactaactttatgattttggatggtactaagaataaacaaatgattaaagtgatgcgcccttatcaagtttacgcaacacaaaatgtcattcaaaaaataaaaaaagttgattttgatatgggactaaacaaaattggctatatctggcatacaacgggttcgggtaagacaatcaccagttttaaaacagcatggcttgctagccgaatgccgggagtcgataaagttgttttcgttgttgaccgaattgctttaacaaagcaaacgaatgaaaattacaaagcgtatgatcctgatggtgcagtggctgatgatagtcgctctggcagtgtgcaagggacacagagtaccaacgacttaagccggaaattaaagagcaaggataacaatatcattgttacctcagtccaaaaactagaaacactggttaagcgtaagagttttaagtcacctgataaacacattgtctttattgtcgatgaagcacaccggtcaactggtggggatgcttttgaactattgcaaaagagctttaaaaaatctgcatgggttggttatacaggcacaccaatgtttgatgaaacaactaacggtttacgaactgaagatatttttggcgaattattacatgcttacacgattaaagaagccattgctgatcgaaatgtattagggtttaaagttgattttgagacaacaattgatacggaaagtatgaaaacacaatacttaccggacttttataaaaagcaacatccagattgggaacagcaaaaggttcaagataaaattgataatttatcacaagaagatatggatgacgaaattgcacctagtttctatgatgaaaatgaagatcatgttcacttagtcgttcaggatatttttaagaattggcgtaatcgttctaatgaaggaaagtacaatgcactatttacaacccatgttggtggtggtaaagcaagtacgccaatggccatgatgtactttaaagaatttcaacgggtcaatgaagagcatgcaaagaacggcggccaactgctgaaagttgcaattacatttagtcaaaatacaacgaataaagatggcatggtcgaaaccaatcagaatttgcacaatgcgatgaagtgttataacaatcaatttggaacaagttttgggttagatgacgtttctggctatacgcaagatgttacgagtcgccttaatcgaactgcaactgacaagaactacctagatttagtgattgtcgtggatcaattactaaccggatttgatgcgccagaaatgaataccttgtatgttgatcgtactttaaaaggggcaggtctaattcaagcgtactctcgaacaaatcgaatcgctgatatgaaagaaaaaccttggggccgagtggttaattatcggtggccgagccagaatgaaaaattaatgaataaagcattagccatttattccaacaaggattcagccactttatcagaaaaagaacagcaaaaggaaaacgtcgattctggagttttagcgaaagactttaaaaatatggtccaagaggttcgtgggattgtcggccaactggatgatttaacggatggttttaatcaattaccaccaagtgaacgccaaaaagacgagatgtttgaattattgcgacaatacaacgtcggtatgtcgaaacttaaacaatatacaccgcaagatggtgaagaagatagtggatttaactatgatacgccggacgatttaattcgcgctttagggatgacaccggcacaagaaaaggaattgaccactgttttaacgaatgaaataaaacaatacattagtgtgcgggataaagtgcctgttcagcaaattgagttaaagatgacgcacatcaaagatgttcaagtcaactacgattacttgacggaactcgttgaaaaactcttgaatgaaatgcatgaagaaaaaattgaggctgctcagaagacgaagaaggatattgatcaatttgcaaatggcttagaagaccaaaattatgcgcacaaaattaaaaacgcgacacaagcgatccttgatggctactatccacctaaagggatggcaatgatatatcctgtcaagttggacgatagtgagcaagttattcaagaagctaatcagattagtattgatcggattttattagaatttcgaaaccagtgggggatcacagatgtgattacaagtgctgggttacgacaactatttagtacgcatcaatatggccaacaagatttagatgatgctggccaattgcgagatattattgctgaagcaagtttgagttataagaatttagcattagatactgatatccaagcactttcgaaaatcaggtaccgaaacggattacgcgaagcaatttatttagcagctgataaacatgtaatacattaaaagatccgcaattaaaggagaacgaatctaatgagtgagataacaacattacaagacatcactaagaaattatgggcaatggccaatgaactccggggaaatatggacgctggtgaatttaagaattatatcttagcctttatgttttatcggtacctttcagaacatcaggaacaatatttagtttctaataatgtgattgatgttgccgatgggcagacaattaatcaagcttatgtcgaacaagcaacggcagatgaattagctgattatcttgaagatatttcgtcaagtttaggttatgcgattgcgccagctaatacgtggcaatcattaaatgaacgaattgaaaatagcacggttattccaagtgattatcaaacgatttttgataatttcaataaaaatgcggtcttaaatcaagaggctgctcaagatttcaacggggtctttaacgacattaatctcggtgattcgcgcttaggtagttcaacgacggcacgtgctaaatccttgaataatattgtcaaattagttgatgatatcgaatataagagtgatgaagataaagatattctaggtgaaatttatgaatacttaattggacaattcgcggccagtgccgggaaaaagggtggcgaattctatacaccacaccaagtcagcaagattcttgctaaattagtcacgatggatgtcgcacctagcaacactgccttctcagtatatgatccaactatgggatctggctcattgttactaaccgttcgcaatcaattgcctgaagctatccgctccggagcaattaagttctatggtcaggaattaaatacaacgacctacaacttggcgcgtatgaatttaatgatgcatgatgtgtcatttaataatatgactttaaacaatgctgatacactcgaaagtgattggccagatggaccggatgaagcaggtgtcgatcaaccacggagttttgacgcagtggttgctaacccaccatattcagcaaaatgggataataatgaaacgaaactaaaagacccccgttttagcgaatatggcaaactagcaccagcttccaaagccgattttgcatttgtgttgcatagtctctaccatttaaataatgaagggacaatggcgattgtattaccacacggtgtgttattccggggtgccgctgaagggaagattcggcaaacattgattgaaaagaattatttagatgccgtcattggcctaccagctaacctattttatggcacaagtattccaaccacaattcttgtttttaagaaaaaccgccaagtgaaagacgttctattcattgatgcaagtagtgacttcgagaaagctaagaatcaaaataacttgcgagatagcgatgttgataagattgtcgctgcatacaagagtagggaagatgtcgataaatacgcccatgttgcaactttagacgaaatcaaggaaaacgattttaaccttaatataccgcgttatgtagacacttttgaagaagaagaaccaatcgacattgatgaagtcaaaaaagaaattgcagccattgatttagaaattgcaaaattagaaaaagaatttgcagaaatggaagcacagctcgtatcaacgaaaaaggagtctgattaaatgaaagagcaaaaaaagcaaccagaactccggtttaaaggctttactgacgattgggaacagcgtaagtttggggagctgtacaaaaaaaaccttgagcgaaataaagatcattttagttcggacagaacaatttcaattgcgactatgcgttttaagaaagagggtaatggtgcggctgaaaactccctagtatcttataaagttctgcgggaaggcgacattgcttttgaaggtcataccagtaaacgatttgcgtttggccgatttgtgttgaatgacattggagatggcattatgtcaccgcgtttcacgacattacgtccaactcaggatatgcctataaaattctggaaacagtatatccactatgaaccaataatgcgttatccgattgttaactcgacaaaactgggaacaatgatgaatgagttagtcgttgatgagtttttaaatcagcctgtgctggttcctgaactttcagaacaacaaaaaataggttctttcttcaaacaactcgacaacactatcacccttcagcagcgtaagttggagcttcttaagaaaatgaaacggggacatttacaacaaatgtttccttctacaggtcagcctactcctcaattaagattcagcaaatttaaaggtgattggaaacaaaataagttaagtggcattgcaaaaattacaatggggcagtcacccaaatcggaaaattacactgacaatcctaatgactggattttagtacaaggtaatgcggatataaaaaatggtgaagtctatcccagagtttggacaacacaagtaactaaaattgcacaaaaaggagatttattattaagtgtacgtgcacctgttggagatgtggctaaaacaaaatataccgtagttataggacgaggggttgctagcgttaaaggaacagacttcatttattatttattggagaaaataaaatactcaggatactgggagagaatcagttcagggtcaacatttgaatcaattaactctaatgatgttaaagaagcaaaattttacgtcccaaaagaaataactgaacaaaagaaaattggaaatttttttcaaaaactcgatcaaactataacactccagcagtctaaagtggaaaaactaaaaattttaaaacaatcttatctccaaaaactcttcccttaaacaaaattcgttaattaacgaccatttattatttatactttgatagtgaccaaaattggtcactattttttatatgggagtggttagttatgcggagaaaatatctttttcacgaatactttgaagaatggatggtgttatataagcgcggtgcgattaagcaggtcacttatgataaatatgaattaacgcaacgtcagattaaaacacttgcgccaacgctgctattgtcggagttagaccgtcgagcctatcagcaattattaaacgattatgctgcgacgcacgaacatcaaacgacaatggatttccaccatcagttgaaatcggcaatctatgatgcacttgacgaaggttatttaaagaaagatccgacgcgtaaagcaattatcaaaggtgttgttcagagacgccataaaatgaaatatcttaatcagggtgagttacgccgactttttggtgtcttaaatctagaagacgaagttaactgggattactttattttattactagctaaaactggcttgcgctttggtgaggcattagggttaacgccatctgactttgattttagaacacaacaattaacaatcgataaaacatggaattataaacattaccgcggtggttttcaatcaactaagaatcagtcgtcagttcgaaaaatttcattagactggcaaatcgcaactcaattcgcacatttaattaaagatttacccgaaaaggaaccaattttcatcgacagaacgcgccgaacacataatgatacagcgaatcattatctagaacgtaaatgtaaacaagcacagattcctgtcattagtgtgcatggtctcagacatacacacgcttcaattttgctatatgcgggtgtttcactagcatcagtggctaaaagacttggccatgccaatatgacaaccacgcaaaaaacatatctgcatattatcaaagagcttgatagtaaagataacgacaaaataatgcagtgcttgatgacactgaactaagcaaaaaaggccgcgatttttcgcgacctttttacatacgtttgttttatggaaagagtttttgaagataagcttgttttaatttatttaactgatctatttttgtttgttgaagaagtaacatgttgtcaacttgattgaaagtattagaaattcttctttgctcatcaaaatgtggaacattgatcttaattgatttgagtgtagggaactttaaattccaagtatcagatgttagaccttgggagtttcttttaaaggcttgtatcatattaaaacgtttaaaatcataagcaaaaaactccgaatcaatttcatttttaggagtaatcacagtatacgccggactaagaatacctttgtatggagaatatccactcgcaccttgccacattctcattgaattgtatgcaatgtctccaatctcaacttttttataatttgatttgttcttactcgagttatcttttctgtctagctcactggccttaacaacacctgaatttatagtaacagaaatcagttcaccttctccacttctctctgttcgctctgtaaaaatttctcccatcgtacattgtttccaatcaccattaaattctttaaatcttaatctaggaagatacttatctttagaaggaaacaattgttgcaaatatccctgttttaactttgtaagaagatctaacttacgttgctgaagtgcaatagtatgatccaatttttgaaagaagtctccgattttttcttgttctttaaaatcagataccactgatataatcaatttatttagatccggtagatttacagactgaacagtcgttccggttttaatgattttctttaaaatatatgcttctttcgattggagttcagcgacaaaaaaatttacgtttaatttggattgatcaaaaagcaaagctttgatatcttgattaattgcaacatcaatagtcggtatgcttaaaggaaatcgcttagctaatattccacttctagtaacaattaatggggttccagcatctaccattctagttttattatcaataatcgccttttttgttatcgtatatgttccatttgagacgtatttattcttgatttcttgtgacgacaaccagactatatttccattccaatactccgggttatctttaaaaggtgttgccccaccaattaatttaattttggattgaaattccacttgttcccaatcgatagacatggttgacaaaatccgtaaacgctatttagactaatatttattactgttatttgaataaatgctttcttatacacagcgatagcatttttaagggcaaatatattatctctttgtgatttagcgtaaaataaaactagatagaattatggattaaataggagtgttacttagatgacaattgaaactgattataagaacttaaagctatgcaaacatggactaccaacttgggatgcaatgttgccagttgcattatctgttgctagtaaacagtcatctgcgattagacgaaaagagttttcggaggcaattgtaaacagtttgcaattgcctgataatctacgccagttaaagtcagaaaaataccctgacgtcaatattatagatagtcgaacgacatttcctatttcagaattaacaattggtggtttaatagaacggccaaaaaggggattctatttaattacaccgttgggtaaacaattactcgagcaatacggcggtaagttaacttctgagataatccacaagctaccacaatttatccaacaccaagacgagttaaaacaaaaagggaatcttgaaaaaactgaagatagtcagtcgacggataattcagattcggttgaaccgatacaaactgtagaccctattgtaaaggactataatgacaccgttagtattgatttacttgatcgtattcgtaaaggaacgccatacttcttcgaaaaattagttgtcgaattactaagcgcaatgggttacaaaggaacaaacggtcaagcttttgtgacgcaaaagagtaatgatagcggtattgatggtattattaatcaggatgccttgggaactagtacggtttatattcaagctaaaaggtatcaagtgggaaacaacgttggtcgaaatgagatgcaggcattttttggggcgttgagtggttttggatcagaccgtggtgttttcataacaacctctaatttctcgaacggtgcaattgagtatgcaaagaaccagcatattgtattgattaatggcgtacggttgagcgacctgatgctgcaataccaagttggtgtgaatgttaagaagcaatatacaacatttgatatcgatgaagacttttttattgaagatgattaatcaatgaaatggagctgattttcaatgcgtaatccactgactaaatttgaatttgcaagtcatggttattttggcccgcatgaagtatatagtcttgatttagaaactggtttgatgattggcagaatggtaacgtatgaatttattcaccctgaagaaattaggtttcaattggatgcagatactatccgtcgggttcgtaatcgactttcaagattgcaacttccgaagtgggctgactattatattaacgagtctatcattgatggtgagcaatggtcagtaaccgcgacctatgcagacggaacagtgattgagtctggtggctctaatgattatccgcctcgctttgggacagttaaaaatttgtttaaaccagttcaacaacagtttttaaaagattagatgtgtaatgaataaagccttagggattagtttttcaagctaatccctaaggctttatttttatgagtgctttagttattctcgtagtatcttctccatcgtcttccccttagccagttcatccaccaacttatccagccagcgaattttttgcatcagtgggtcttcaatggcttcaacgcggacgccgcaaaccacgccggtgatgagaacgcaattcggattcatttgaggagcttcctcgaaaaacgtttggtaggggatgtcttttgcgagttgggcagcgagttcggtttgtgagtagccggttagccagcagataatctgattgacttcggcttgggtgcggtttttgcgttcggctttttggacgagcatggggtagattttggaaagagacatgttgaagatgctttgcatgggcatgagaaggcctccttggcagtttagataattaatatatagcatgtaatgaaaatgaatacaaaatttaggtctgagaaagagtgaagttatttttcactctttttcttttgccctatttcttttccgttactttcttgttataatcgataccagttgtccgtgttataatacagcggactaaatgttataacagaggagagtacagatgagtattggcgatattttaacgaagacgtttacgaacatggatattgtgagttcgatcacgtcgacagtgtttattattttattaggattctactgccgcaaacgcgagatcttcacggataaatttgggaagattctgtcaaaagtcgttttaacggttgctttaccagcattagcattcaactcattcatgcaggatattaatgggaagactttaaaagaaggcatcaacgttttagtttggggcttcttgatctatattattttaattttaatttcaaaaccgttatacttacgctttaagggtgatcaacaagatacattgcgcgtgttgaccatctttggttcaacaacgttcttcgggattccaattgttggagcagttttcggagctaaaggggttatgtatagctcaattttcaacattggttatcgcgtgttcttatactcatatgggtacatcaagatgagtggcttgaagatggaatcgaagaacttgaaaaacatgttcttaaatccaatcgtgatcgccacatttgcggggttaatcatctggttaatccaaggcgcattaccacaagtggcggttgctgggcattcagtggctttcttacgaattgatcaaacagcgccatggttgttcaaaccaatgacgtacttagctggcttatgttcaccattagcttggttagcaattgggacaacacttggcgaaatcagcttcaaagaagctgcttcggacaagacatcatggatttatagtattaacaaagtgattttagtacctgctttaaacatcgtgttattggccatcttaacaatgacccacattttaccagttagctatatcagtttggcaacgattgtcatcatgatggcaacgccaacggcaacggtcgccgctgcttacgcgattagttttgacaaggatgcggtcttagcatcgaacgcgtcattactatcaacggtcttagctgttgtgatgacgccagtctggttagtgattttagaagtgattaaccaaatcgggattttctaggaagagggaaattaaatgtttaaaattgcttgttacggcgttcgtccgaatgaagtggcgacgttcaataaatataacaactacgattatgatttaacgttaattgaagacttattgacgcacgacaatatcgaaacggctaaggggcatgacgcggtcttgttacgtgccaactgtaccgctgatgcgcaaaacttagcgaagttgaatgaatacgggattcgttacgtgtttacccggacagtcggttacggtcatatcgatttggctgcagcaggcaagtacaacatggaagttgctcgcgtgccagcctactcgccaaacgcgattgctgaattggcattgacgctagggatgtcattgttgcgtcacaccacttacacaacgaatcggacagcccatcatgatttccgtgtgagcccagtgatgttcagtaaagaagtccgcaactgtacggttgggattatcgggactggcaagattggctacaccgaagcgaagttatacaaaggcttaggtgccaaggttgtgggttatgacttatatccatcagaaatcgctaaggaagtgcttgattttgtcagcttggatgaattattagcccaaagtgacattgtcagcttgcacattccatacttcgctggtcaaaacgaccaattcatcaatgcggacttaatcgcaaagatgaagaacgatgcaatcttggtgaatacagcccgcggtcaattgcaagataaccgtgcgattatcgatgctttgaaagctgatcaacttggtgcattcgccgctgacgtgttaccagctgaaggcgaaatcttcttcaagcaattcccagcagatcaacctgtgccagatgcaaccacccaagaattgattgatttatacccccgtgtcttgttgacgccacacgttggttcaaatactgacgaagcgctcaagaacatggtcgagattagttttgaaaacttccatgaaatcttgacgacgggtaagacgcaaaatagcgtcgcaaccactgaaaattaaagcggttgtttgtattttcatgaaaaatatggtatattgttatcagtaattagatacttcagagcgagtgagcagaaatgctcactctttttattggagcacgtctaatctgaaatataaaaatgaattggagggaatcatttgagtaccgttgtggaaacagttcacgatctgatcgtgccgattcttgatcaacaccattttgaattagtggacattgaatttgttaaagaaggtagcagttggtatctgcgcgtcttcattgacaaaccaaatggcattgaccttgaagattgtgccttagtaaacgatgcgttaagtgagaaactggattcaatcgacccggatccaattccgcaggcttatttcttagatatttcatcacctggtgcagagcgtcctttaaagaaggaagccgatttccaaaaagcacttggcgaatacattcatatctcgttataccaagctgttgatggcgagaaaatctatcaaggtacactaaaagcccttgatgatgacactttaactttagtgattaaaattaaaacgcgtcaaaaagaagtaacgtttaatcgtaaggaaattgccaaagctcgcttagcaattgaattttagtaaaggtaggctagttacatgagcaaggaaatgttaggtgcacttgatgcgctagaacaagaaaaaggcgttaaaaaagagattgttattgaagcccttgaagcagcacttgtttctgcttataagcggaattacggtcaagcacaaaacgtggaagttgaattcgatcaaaagaagggtaacatccacgtctatgctgtcaaagaagtcactgaagaagtgtttgattcacggcttgaagtgagctaccaagatgctttggaaattaacaaggcatacgaagtgggcgatacaattcgttttgaagtcacaccaaaagacttcggccgaattgcagcccaaactgctaaacaagtgattatgcaacgggttcgtgaagctgaaagaagtatcatttacaatgaatacagtcaatacgaaaacgaaattatgcaaggggtcgttgaacgccgcgataacaagttcatctatgtcaacttaggcaagatcgaagctgttttaagcaagcaagaccaaattccaaacgaggaataccaagcacatgatcggattaaggtttacgtttcaaaagtggaaaacacaactaaaggcccacaagtctttgttagtcggacacaccctgatttagtgaaacgtttattcgaacaagaagttccagaaatttatgacggcaccgttgaaattgtctcaatcgctcgcgaagctggcgatcggacaaagatggctgttcgttcaacagaccccaacgtcgacccagtcggcacctgtgttgggcctaagggacaacgggttcaactagttgttaatgaattacacggcgaaaacatggacattgtgaagtgggaagaagatccttcagactacatcgccaatgccttgaatcctgccgaagtcatcgctgttcaatttaacggtgataacgaacatacatgtacagtcatcgtccctgattatcaattgtcattggcaattggtaaaaaaggtcaaaatgcacggttagctgcgaagctaacgggccacaagattgacatcaaacctgaatctgaagtcgaattcgttgatgaagacgacagtcaagatgaaggtgcagtcgttgaaggttttgaagaagaaacaacagaagctgttgaaggcttcgaagaccaagcaacggattctgctgttgattctgaagaacaaccacaagaataagtgaggtgttcatgatgaaacaaagaaaagtaccaatgagaaaagacgttatttcgcaagaaatgaagcctaaaaaagaaatggtgcggattgtaaagactgccgaaggtgagattagtattgacccaactggtaagaaatcaggtcgtggcgcttatgtttcactagaacctgatgcaatcaagaccgcccaaagcaagaaaattttagaaaagacgtttgggattgacgttgcagaatcattttatacagaattattcgaatatgttgatcatcaaaaggctcggctagaattatttggagaacgaaaatgagtgaacaaccagaccgtttattacaactcttaggtatttgcatgagagcacggcaactggtcagtggtgaagaacaagtcctaaaagccattcagcagcaaaaagcgaaattggtttttatcggctcagacattagccaactgacacagaagaaattgactgataagagtcatttctacgaaatcccggaaacaaaagcgtataccgcggcccagctaacccaagcaattggattacatagagccaccatcgcggttgttgatgccgggtttgccaaaaagatgataacgctactgggataataaaggagcgtgaagatatgggtaaaaaacgtatctatgaattagcaaaagaaattaacgttgccagcaaagatcttttagaaactgccgttaaaaaaggttacgatctaaaaaatcacatggcaactatcgatgacaatcaagaaaaagctttgagagccatcttccataaggaaacaaaaccagctgcaacgacaactgacagcaagccagccggtgcagcacctgctgcaccaaaggcaagcgaaaaaacagataacggtaagattaagattaacaaagccgctatccgtcgtcgtccagaagctagcagcaaaccagcacctcgttcaaacaaccaacgcccacaaggcaaccggaatggccaagcagcaaatggtcaaaaccgcaacaatgccaatggtcgtcctaacaacaataacgcccgtcctaataatggtcgccctaacaataatgcggctaaccggacaaacggcaatacgcgtccagctgggtcaaaccaaccattgagcttgcaagaacaaatctcacaagctaatgcacgtcgtcaaagaacgcaagaacgcattcaacaacaacgtgaacaacgcgaagcagacgaaaagaaacgccgtcaacaaagtaaccgcccacggccagctgctaaaccaaacggtaataacagcagtcgtccagccggcaacaagccagccggcgcacgcccaacgacgacaaataatcgtcctgcaaacagcaacaacaacggccgtccagcaaacaatacaaacagccgtcctaataacaactcgaaccaaagtcggccagtttcggcacaagaaatgcaacaaaaaatgcaagctaatacggtgagtgctgctaaaccagcatcaaacaatacagcaagcaagccaaagaactttggtccagataagaaacgtggcggcgggtataacagctacggtaacaatcaacaacgtttcaataagaaacgtaagaagacccgtaagcaacaattagctgaacaaaatgctgctaagaaggaaatgccacaacgtaaagaacggccattaccagaagtattagtttactctgaaggcatgaacgttgcggacatcgctaagaagattcaccgtgaaccagctgaaattatcaagaagttattcatgttagggattatggttaacatgaaccaatcacttgataaggatacaatcgaattattagcaacggattacggcatcgaagcagaacaaaaagtggaagtggatattgctgatatcgattcagtatttgaaacagaagctaagagtgatgccaaccttgtgagccgtccaccagttgtcacaatcatgggtcacgttgatcatggtaagacaaccttattggataacttacgtaacagtcacgtgactgatggtgaagccggtgggattacgcaacatatcggtgcttaccaaacgaagttaaacgatcgtttaatcacattcttagatacacctggacatgcggccttcagtaacatgcgtgcgcgtggtgctgatatcactgatatcatcatcttagttgttgctgctgatgacggtgtgatgccacaaacaatcgaagccatcaaccatgccaaggctgctaaagccccaatcatcgttgcggtgaataagattgataaaccaggcgcaaacccagatcacgtcatggaacaattgatgggttacggccttgttcctgaagactggggtggcgataccatctttgttaagatctcagctaagactggtgaaaacattgatgaattacttgaaatggtgcttcttgaagccgacgtgcttgaattgaaggctaacccagatcaaaaagcagttgggacagttatcgaagcccgtcttgataagggtaaaggacctgttgcatcactcttgatccaacaagggacattgaagattggtgatccaatcgttgttgggaatacctttggtcgtgtccgtgtcatgacaaatgatcgcggtcgtcgtgtgaaggaagtcttcccatcagaaccagttgaaattactgggttaaatgatgtgccacaagcagctgaccgttttgttgtctttgaagacgaaaaaacagctcgtgctgctggtgaagaacgtgccaaacgtgcgctcttgaaggaacgtagccgttcaaaccctgtcacattagataacttgttcgaaactatgaaacaaggcgaattaaaagaagttggcgttattatcaaagccgacgtacaaggttcaacagaagccttggctggtagtttacggaagattgaagtcgaaggcgtgcgcgtgaatattattcatgaagccgttggtgcgattaacgaaagtgacgtcacattagctgctgcaagtaacgccatcatcatcgggttcaatgttcgcccaacaccacaagctaagattcaagccgatgctgaacaagttgatattcgtttacaccgaatcatctacaaggcaatcgaagaaatcgaagctgctatgaagggtatgttagaaccagtttacgaagaaaaagtaacgggtcaattaactgttcgtgaaacatacaatgtttctaagatcgggacaattgccggttgtatcgttgacactggcgttatccaacgtgatagtggtgtccgcttaattcgtgacggtatcgtgatttatgaaggtaaactttcaagcttgaaacgtttcaaagatgacgttaaagaagtcaaaactggctttgaatgtggtgtgacaatcgaagattacaatgatattaagattgatgatcaaattgaagcctacgtgatggaagaagtacctgttaaataattaatttacaggaggacaagcaatgaaacatcgtgttggtcgggttgaacaagaaattcaacgcgaaataaatgacatattattaaaaagagtgcgtgatccccgagttgaaggggtcacaatcactgatattaatctcagtggtgacttacaacatgttaaagtttattacagcattttatctggcttagcaagtgacgctgaaaagacacaagctggcttagataaagctaaaggattgattcgcagcgaacttggccaacggattaagttgtacaagattccagaaatcacctttgaacaagacggttcagtgcgttatggtgaacatatcgacgaacttttacgtaagttacacgaagatgaagcacagcgttaaactgtgaaaaagagccccgcgaaagcggggctctttttttgtttgaatgaccttatggaaacgataatctattaaattgacttagtcatttgcaccatattactattctttcaaaagttgattaaatatcgaccgttaaaatatatcgtccaacgctatcggcggcgaattgataagcgttatacagaggccttatcagtttctaatcgctggttgcggttttattatcatcaacgagaaatatcccacattattccacagattctttattatttagaggctaatccggcactagaaacgattgatgatgcgattgcttatattgatagtcagccggttagtttagagctgtatcaaaataacttaagcgagtttcgtaaataggttaagcagtttaatacaatggtgctgagtacagcgaacaacctgggacaaccgtctagtcgacagattaattttgtcacgcttgatgggataccgaatgtctggtattttggcaccgaccccgaagcgtcgaaagtcagtgaactcgatttggggcgagccgcaatttttacgctaccgactagtgaagaattgtgaatcacgagtaaccggctcaaggtataccgaactcagtatcgttttagtgatatagcagaggcctatcaaaaacaagtaccaggctatgttgagagtttatccaaagaagaacaggaaaaagagattatttttgcgatcgaattaaaaagtgctaggatcgatagtcggtttcaaaataaaggactcactttttctgagtaaaaaaagttactaataaggtagattgtaaaattaatccgaacgctgttcggacaaaaagatcagcttcctttaaaatggtgtttaccacaaacccatcttttaggagctgatcttttgtctagtataacctattccgaacgaattaaaatcgaaaccttttgtgaactagggctgtccaatatccaaatgggcgttcggctgaaccgatcaccgtcaacaatttcttatgaattatctcgatgtcaaccttatcaggctgaattagcacaaacagatgccgaatacaagcgatcacgatgtggtcggaaaactaagctgagcgatgagttaaagcaaaaaattctcaaccatttacgtctaagctggtcaccaggaatgattgctcacgaatttaaactagctactaaatctatttataattggctaaatcaggggagaattggtttctccttgaatgatctacctgaacatggcgtacgccaacggcgtaacgttgaccaacgatccaaatataatcaatctttggggcgatcaattgaacagcgtcccatgatgattaatcaacgtaagcgcatcggcgattttgaactagatacagtcgttggtcctcgtgggcatagtaaggcagttttattaactttaatcgatcgcaaatcacggttcctttgggcataccggttaaaagatcggacgacagcgactgttaatgaagccctaactaagttcctaaccacttttaatggtccggtgcacagctttactgtggaccgtggcactgagtttagtgggctagtatcacttgaatcacaatatggtattaagacctattactgccatgcttatacgccagctgaacgtggtagtaatgaacgctttaatcggaatttacgttatttttatcctaaagggactcgttttgagcacattagtgctcaagatttaacgacgacgttactccaaattaaccagcgaccgcttaaaatactcgactggcaaacaccgtatcaggtgatgctgacaaatttgtccaaaaattcggattaaatttgcaatctaccataaaacaacattgagcgaggatgggcaagagtttcttttgtcccatctttttttgtgctttgataataaattgagcagcatcataaagctaatcccgttcgacttcacactctatgctataatagtttagttaatacttaaaggagattacttatggacggcattgtacccttatataaagaacgcggcatgacgagtaacgattgtgtgtttaaagtgcgccgcattttacacatgaagaaagtgggccattctggcacgttggatcccaacgtcgatggggtgttaccaatctgtatcggtcaagcaacgaaggttgttgatcaattggtgcattctggtaaagtctacacgggtgaaatcacccttggcttatcaacaacgactgaagacttagatggtgaagtcgttgaagaggcgcgcttaacagaacctttttcaactgagaaaatcaaagagaccctcgctagttttctgggcgattcaattcagattccccccatgttttcagcggtgaaagtcaatgggcggcgtttatacgactatgcgcgcgctggtgatccagtcgaacggccacaacgttcaatcacgattacgcagtttgatttggatggtgaaccacaatttgacgcagaatctgggcgccaaacattccggttcattgtcggttgctcaaaggggacttatatccgcacattagctgttgatttcggtcgtaaacttggtttacccgcagtgatgtcagatttgacacgtcttaagagtggcggcattcaaattggtaactgtatcacgttggaacaattggcgcaaaaagctgaagcgggcgaactggcagacgttttattgccaattgaccatgtatttgaagattacaagaagattgctttagacgacgatcaatgggccaagcttttaaacggtgtgttcttgacattgccagaacaaaccgatgagattgtggcgttgacctatcaagggcatatcaaggcgctctatcaagttgaaaaagcagcgcaacatctttatcgcccttataaaatgtatttacaaaatcaagggactcattaaaaaaaactaggtgaaaaatatgcgtgtcattgaattaattcatccatattcaaaagaacaagtgccagctgaccaagtggtcttggcgcttggcttttttgatggcgtacatcgaggtcatcaagctgtaattcggaaagcaaaacaaattgcagttcaaaaaggtttaccattagctgtgatgacgtttgatatccatcctgccattgtttatcgcaatgccgatcgggagtcattccgttatttatcaacggttgagcgcaagcaagaattgatggcggagttaggcgttgatgttttctacatcgtgcactttaatgaagcatttgcacaactagccccacaaacatttgtcgatcaatacttagtcgctttacatgcggatacagtggtggctggctttgattacacttatggtaaaaaagagattgcgaatatgacgacattgtcagactatgccaaagggcgctttgccattgtgacagttgcagaacatgaccataatggtgtcaaaatcggctcgacattagtacgagaggatttagatgctggtaagattgcggaagctaatgaattactcggttatgtttaccaaacgaccggtgaagtagtgcatggtgaagcacgcgggcgagaattagggtttccaactgctaacatcgaatcgcaacgaccagaacgattaccaggaattgggatttatgcggtccgctttttagtgcgcggtcaatggtatattggcatggcttcaattggtcggaatgtgacgttccacagcaataacccggtaacggtggagattaacttattagatttcaatggcgatatttacggtgaacaagtgaaagtggattggtatcactacttgcgcgacgaagtgaagtttgactccgcggaagccttgattgaccaactccaccaagacgaagccgatacccgaacttattttgagaaattagaggcacaacattaatggcaggcgcttatattcacatcccattttgcgagcatatttgttactactgcgatttcaataaggttttcattgaaggtcaaccggtcgatgattatgtcgatatgttgattcgcgagtttcaattagtgatggcagaatacccagacgaaccaattgatacgatctatgtcggtggggggacaccaactactttatcaccagcacaactccaacgtttaatcgatgggattcatcaatacttaccttatgagggtggtgagtttacgtttgaagccaatcctaatgacttacaagatactgaaaaattgcaagttctgaaggacaacggcgtcaaccggttaagtattggcgtgcagtcgtttaatgatcagattttaaaacagatcgggcggattcaccgaagtgcggatgtttatcgggcaatcgataacgcgcgcaaggtcggcttcgaaaatatgagtatcgatttgattttccgcttaccacaacaaagtgaagcggatttcatggatagtttgaataaggcaattgaactcgacttaccgcattattcgacgtactcattgattctcgaacgcaaaacaatcttctataacttgatgcgccaaggcaagttgcatttaccatcgcaagatgttgaagcacatatgtatcaagccgcgattgatagtttcaagcgggctggcttagatcaatatgaaatcagtaattttgccaagccaggctttcaatctgcgcataatctaacttactggcgcaatgaaaagtattttggctttggtgccggtgcttacggctatttaggtaaggatcgttaccataacttcggcccaatccaacaatacctagaacccttaaaagaaaataaggtgccagtcattgaacgccatgttctgccactgaccgaacaaatggaggaagaactcttcctcgggttacggacgatgcaaggcgtatccatcagtcattttcaagataaattcaattatccattacaaaatgtttacggcgaaacagttgccacccaaattgcaaagggctacctcaaacaagaaggcgattggttaagactaactgaatcaggtaagttcttaggcaatgaagtcttccaagagtttctgctagatagttattgagtgcgttcaaaccgggggatattctgagcattcgccttgtgtcgctaggcacaggaatatggtttgaaaagcacgttataaatattccacttcataaagcgagtctcttccatctaagaagcggctcgttttttattttgtcctttggtccagtaaggccctccgtctaaggaccgattttcagtaaatccgtaaaaaagccggtacgtttcttgactttatttgacgttcttgctatattaataattgtaattagcactcatgatattcaagtgctaaaaagaggtgatgacatgctgaccgaaaggcaattaatgattttgaaagaaattattcgtctttttacagagagtggtcagccagtgggttctaagaagttaatggcagaattgccggtacacgttagttctgcaacaattcgtaatgatatggctgatttggaaagtgtcggtttaattgagaagacgcattcgtcatctggacgggtaccgtcgatgcaaggctatcgctactatctagaccatctcatgcaaccagcaaccctcaatccggttgatgtggcaacggtccaacaatcatttggacagcactatcataagattgatgaaatcgtctcacaatcggctaatatcttatcgaacctaacgagctatacagcaatcgcgttaggaccggaagtggctgagattcggttaactggttttcgtctagtaccgttgagtaatcaccaagtgatggcgattatcgtgacgagtgcagggacagttgataatcaggtatttaccattccacaagcgatttcgggtgatgaactcgaaaaagccattcgaatcattaatgatcacctaattggcttaccgttaaccgtggttagtcagaagttaaagacggatgtaccggcgctattagcccagtacatggcttctccgaccggctttttagacatcttcgacgatgttttgaaaaaggcgagtcaagagcgcttatttgttggcggtcagatgaacttgttgaatttttcagagttctccgatgtcacccagctgaagtcgttgtataacatgattaatcgttcagatgatttagccaagttgctagatttgtcccctggaggcgccaatagccaagttcaggttcgcctgggcaccgagatggccaacgatctgttgaaacattatagtctaatgactgttaattatgacgttggtgaacacggacagggagtcattgcactactgggccccactagcatgccctattcacggatgattgggttactcgatttattccgtgaagagttagcgaagaaattaattgattattatgcgaatttcgatgatgatcaatcttaaaaggagcgtgtttgtttgaccaagcaagaaaaggctgagaaacaagaaaagccagtagcagaaatgccagaaacagaaacacctaaagaagaaacgccatttgaacctgaattagaagcagatgaagtgatcgaagatgctgcacctgacgaagatgcagctaagccagatttagcggctcaacttgctgaactccaaaagaaatatgatgatttagaagatagtttcttacggtcacaagctgaaattaaaaacattcaaacccgtcatcaaaaagaacaagctagcttgttaaaatatgatgggcaatcacttgcaaaagatgtcttacccgttttggataatttagaacgtgcgttggcaactgaagcaactgatgatagtgctgagagtcttaaaaagggtgttcaaatgacatacgatcatatgaaacatgctttagaagatcatggcgttaaggaaattgaggcgcaaggacaagcctttgatccgaccattcatcaggccgtgcaaacggtcgctgttgatggtgatcaaaaagcggatactgttgtacaagtcttccaaaaaggctactacttgaaggaccgcgtcttaagaccagcaatggtcgttgttgcacaataaattaaactaaaaatctaaaaaaagagggtattttttatgagtaaagtaatcggtattgacttagggacaaccaactcagctgttgccgtattagaaggcggacaaccaaaaattatcacaaatccagaaggcgcacggacaacaccatctgttgtgtcatttaaaaacggcgaaatccaagttggtgaagtggcaaaacgccaagcaatcactaaccctgatacaatcgcatcaatcaaacgtcacatcggcgaagcaggttacaaagtaactgttggcgataaatcatatacaccacaagaagtttcagcaatgatcttacaatacatcaagaaattcgctgaagattatcttggtgaagaagtcacagaagctgttatcacagtacctgcttacttcaatgattcacaacgccaagccactaaagatgctggtaagattgccggcttagatgttaaacggattatcaacgaaccaacagcttcagcattagcttacggtttggacaagacagaaacagacgaaaaagtcttagtttatgaccttggtggtgggactttcgacgtttctgttcttgaattaggcgacggtgtcttccaagtattatcaacaaacggtgatacacatttaggtggggatgactttgatgaagccatcatgaactggttagttgaaaacttcaaatcagacaacggtattgacttgtcaaaagacaagatggctatgcaacgtctaaaagatgctgctgaaaaagctaaaaaagatttatctggtgtgacaagcacccaaatcagcttgccatttatctcagccggcgaaaacggtcctttacatttggaaatgactttatcacgtgctgaattcgataagttaacatcagacttagttgatcggacaaaagcacctgttatgaatgctttgaaagatgctggtctagaatcaggcgacattgacaaggtcatcttaaacggtggttcaacacgaattcctgctgttcaagaagctgttaagaactggacaggcaaggaacctgatcactcaatcaaccctgacgaagctgttgctcttggtgctgctgttcaaggtggcgttatctcaggtgacgttaaagacgttgttttacttgatgtgacaccattatcattagggattgaaacaatgggcggtgtcttcacgaagttaatcgaccggaacacaacaattcctacaagcaaagcccaaacattctcaacagctgccgacaaccaacctgccgtagacatccatgtcttacaaggtgaacgtccaatggctgctgataacaagactttaggtcgtttccaattaacagatattcctgctgcacctcgtggtgtgccacaaatcgaagttaaattcgatattgataagaacgggattgttaatgtttctgctaaagaccttggcacaaataaagaacaaaaaatcactatcaagagtaactctggtttatcagacgaagaaatcgatcgcatgatgaaagaagctcaagaaaatgaagaagccgacaacaaacgtaaagaagaagttgatttgaagaacgatgttgatcaattaatcttccaaacagataagactttgaaagaacttgaaggtaaagtttctgacgaagaattacaaaaggctaaagatgctaaagaagaattagtcaaagcacaacaagaaaacaaccttgaagacatgaagacaaaacgcgatgcgttgagtgaaatcgttcaagaattaacagttaagttatatcaacaagcacaagaagcacaacaagctgctggtgctgaaggtaatgcaactgacggtaagtctgacgatggtactgttgacggcgacttcgaagaagttaaagacgacaaataataatgcgttttaaaaaaagccaaaacctagtatggtctagggccttggctttttttaatcagtcaattatgctatccttgataggatagatttaacgcgtaagtatatgaatggaggcccacaatggctgataaaagagattactatgacgtcttagggataagtaaagacgcctcagatgatgagattaaaaaggcctatcgtaaactttcaaagaagtaccatccagatattaacaaagccccagatgcagaagccaagttcaaggaagtcacagaagcgtatgaagcattaagtgacccacaaaaacgggcagcttatgaccaatacggtcatgctggtatgaacggtggtttcggcggcggcgcaggccaaggcttcggtggcggctttggtggtgctgaaggcttcggcggtttcgaagatatctttagttcattcttcggtggcggcggtgctcggcaacaaccaaacgctcctcgtcaaggttcagatttacaatatcggatggatttgaagttcgatgaagccattttcggcaaagaaaccaagatttcttataaccgtgaatcagaatgtcacacgtgtcatggctctggtgctaaaccaggaacaagcgcccaaacgtgtcacaaatgtcacggtgcaggtcaagtccaagttgaacgacaaacagctttcggccgcatgatggctcaagaagtctgtgatgtctgtggcgggactggtaaagaaattaaagacaagtgtgaaacatgtcatggaacaggtcacgaagatgaacggcatactgttaaggttaaagtgccagcaggtgttgaagatggtcaacaaatgcgtcttcaaggccaaggtgaagccggcacaaacggtggcccttatggcgatttattcatcgtcttccgcgtggcaccaagtgctgaattcaagcgcgatggcgcacaaatttattcagaagtcccaattagctttgtccaagctgctctaggggatgaaattgaagtcaacacagtccatggtcctgttaaactaaaagtgccagcggggactcaaacgaataccgtcttccgtctacgtggtaagggtgcgcctaagctccacgggacaggtaatggggatcaaaacgttacagttaacatcgtgacaccaaagaccctcaacagtaaacaacgtgatgcgctaaaagcatttgcagtcgcaagtggtgactcagttaatccacaagacaacaacttattcgacaagattctgaacaagaaacacaaaaaatagaagtgcgtcaaaagtggttatcctgtgaggattagcctaacagggcgaatgattgctgtaagcaatcgtttgacttgtgtagctaaccggaataggatgcttttgaaagcacgttaaaaatagaagtgcgttcaagccggttatactttgaggactagcctagtttcgtgaatgagcgacgaagtcgatcgtttgcgggacgtagctagccgcagaagtatggtttgaaaagcacgttaaaaatagaagtgcgttcaagccggttatactttgaggactagcctagtttcgtgaatgagcgacggagtcgatcgtttgcgggacgtagctagccgcagaagtatggtttgaaaagcacgttaaagcccctctaatccacaagattagaggggctttttttgttggagtggataggtgggagatttttgaaaaattctgttataatggcggtaataaattaggacggaaggtgagttgcatggatgacaaagataaattagaacttgaaattgcacgccttaagatggaaaatgagaatttacggttgaaagctgaggttgaacagcggaagaataataagtactggttgtgggcattagtgccaattgtcgcgattcttgctggcaacatgacctcattttcacggatgttcatgcatttttgtagatagttcacgatagattgcatagaaataggcgttaagcagattatgaaaactgcttaacgcctattttttattggcgactgtgacggtagccgtaactgaagtaaattgttaggccaatcaccaaccagattaagaagacaatccaagttgttagttgtaactgggtcatgagtagtaagcataagccgcatgaaagtaaaggaatccatgggaatagtggcactttaaacccttgtggcaattcattataaaatggtaacttgcgcaggaagatcacaccgagagaaacagttgcaaaggcgaataacgtgccaatgttgaccaattcagcaatcttatcaagtggcactaccattgcgacgatgcttgtgacgatggcgaaaatccatgtattcgcaactggcacatgtgtttttgaactgactttggcaaaaacgggtggcaatagcccatcgcgactaatggcgaagatcagacgtgttccgccgtaggtcataacgagtaggacagttgtcataccggcaactgctcccagggcaacaatcccagcaacccagttttgatgcatcaattgaagcgcaaaagcaacggggtcaccaacgttgagttttgtatagtgcacgacgccaacgaggacggtggcaactgcggcatacaataatgaagcaatcaataatgaagcgataatcccgattggcatatcacgttgcggattgacaacttcttctgatgcggttgaaacggcatcaaagccgatgtaggcgtaaaatgctaatgctgccccagaaagaatgccaccagcaccaaatggtaagaacggtttgaagttggctggtttcacatagaaaatggcaacgccaaggaaaattacgatgacagcgactttcacaccaaccataatcgtattaatccgtgttgattcgcgtaagccatttgatagtaagaacccaatcaataacgtaattaaaccggcaattaaattaataccaccagggtggccaggcgtccatgcagtcgataagaaggtaggtaagtgtaatccaaagccagcaattagattttggaagtaggctgaccaactgacggccactgaggcgactgcgaagagatattcggaaataagtgcccaacctagaatccacgcgattaattcaccgaagacggtgtagacgtatgtgtaggcactaccggccaagggaattgtagaagcgaattctgaataacaaagggcagccattgcgcagacgactgcagcgagcaggtaagacagcatcgcaccgggtccagcatatttagcggcgataatccctggtgtgataaaaataccggcgccgacgactgcaccaacccccatggcggttaaaccaaaggcggttaaatggcgttctagtgtactatttttaaattggttcacgtcgatttgttttttggcaaagagtgaatgttgtgtcattagtaactcctttttaagtgagatgattctaattttaatcggtctactgagaagcgtcaagataaaaaaagcgccatgacagtgattgagccgttatggcgcggattagttaagtgattaaattaagccccagtggcgtaaaccctcaataatgccaccttcagtattcttagaagtaatgtatttagccttggctttagcttccggaataccattgcccataacggtgggatagtctacgaagtcgagcattggtaagtcgtttgtaccatcgccaaacgcataagttgggatgcccattaagttttgtgagcgaatcaattctttaataccggtttgttttgaacaatctttttcaaccgtatcaattgagttcggtgtgttgcggtagaatgttaagtcggtacttagtgtttctgtataggccttgtcattgtcgtttgtgagaatcaacatcatgtagactgaatgattcaagtaatagtctggatcaacttcggggacgggggcgttgacaaacttgtaggcatctttgccgggttgagttacagccgtaatccggattgcttcttcattataaaaagcgatggcttcgtcagcagcattagcaattgcgacggttttttcaatcacgggcgttggaatagtgcctttataaacaggttgaccttcatattgaatgaagctcccatttaaacaaatgaatgaatcgatgccggtttttgcaagtgcatcttgaatttcaagcggtgagcgaccggtcgcaatgattggtaagtagttgttggcgcgtaattggcggagtgcaatcgcaacagctgcatctacttcagaatgttcgttgtaaagtgtaccgtcaagatcgaaaaatactagtcctttataagtcaaaatggggcctcctaaataatgatatctgcttaacatgctatcatgcttagcgataccatgcaaacgggaaccgtgatgcgtttgattttcatcacttcttcatatattattcatccgtaattggtttatctactgtataatatagacatagcaacgtaaaaagagaaggaattctaatgaaaattttaatggtagaagataacaaatccgtatcagaaatgatgagtatgtttttccaaaaagaagcttgggatgcccatttcgcttacgacggcaatgaagcagtggaagcctttagtgtcgatccagagagttgggacattatcacgcttgatttaaatttaccgggtttagacggaatgcaagtcgcccaaaaaatccgcgagttgtcgaagacagtaccaattattatgttgacggcgcgcgattctgaaagtgatcaagtgcttggccttgaactcggtgctgatgattatgtgacaaaaccctttagtccaatcacactgattgcacggattaaagccttacatcgccgtgctgagttgattgatgaacaagtcgaagcagctgaagaaaacgtacaacaagcggctgaaaattcagattttgatgtacaaacaacacactttaagttgagttctaaaacgcgtgagacttatttattggacaaaccaattttagatttaacgccaaaagaattcgatttattgaagacgttagctaaaaatccccgtcaagttttctcacgggaacaattattagaacttgtgtgggattaccaatacttcggtgacgaacgaacagttgatgcgcatatcaagaagttacgtcaaaagattgaaaaagtaggaccacaagtgattcagaccgtttggggtgtcggttataaatttgatgattcagacgcagcgcgcgaatgaagcttatttatcaatggatgttggcatttttcggcgtcattatgacgaccattattattgtggggattgcgtttacgcaatattcgacaaggaccgcttatgagagcacctgggatcaactagaaggttacgcggatgtgattgaacgtgaagctttcaaacaggggtctcaagcggccttgtcgacccaattcattattgatagtcaacaaatcctttcccaacaacacgttgggtttaatttctttaacgccgaaaacgagatggtgtatcctaccccggatcctaaagtttcggtcaagaaacaatattggaaacatttaaagaatggccagattcaacggctgagcttaagtcgtgattcgcaccaagtgaataacaataagcaagaacagttagtggtcttcaaacccgttttttacaataacaaactgatttacgtgattggggtggcagcaccactacaaaccgttaaatctggtttgacaacgatgcgcaagaacctcttgattgcctttttactatcgacaatcggtgggattctgttgagttacgtcttagcacggtatcaaatttgtcggattaatcgcttacgaaatgcgacccacctagttgctgaaggagattttaatgttcagattaagaatcctggtaaagatgaattggatgatttggccaccgattttaatgagatggtgcattcgttgaatgaatctgaagaggaaattaagcggcaagaagatcgccggcggcaattcatggccgacgctgctcacgaaatgcggacgcctttaacgaccgttaagggtctgttagaagggttgcaatatgatgcgattccagaagagatgcgcgccaagagtatttcattaatgcaaaatgaaaccaaccgactcattcgcttagtcaacgagaacctggattatgaaaagattcggactaaccaaattaaattgaacccgcaaacgtttaatgcggtggaagctatccagaatattcaagagcaattcgagaagaaggcgactgaagccggtgatacgctcatcttggacgcccaagagaatgtcccaatctatgccgactatgaccgttttgtccaagtgatgtttaacatcatgcaaaatgccattcagtttacagaaaatgggcaaattacggtgactgcggaagctggtttccacgaaacaatcttaacgattagcgataccggtatcggaatgacggacgaacaagtcaaaaatatttgggaacggtattacaaagcagatccatcacgtaagaataccaaatatggtgaatctggtttagggttggcgattgtccaccaactcgtccagttacattatgggacgattgaggtccaaagtattcctgaacaagggaccacttttaccttaactttcccagatgaaacgattgtgacaagtgaaagctaaaccaatttaaataggcgtcacgacaaggattaaattgtcgtgacgcctattttttagattaaatatgcaattgcgtttgagctggttgggtttcactgatgatttcgccagcgtgcattgagagggtaacagcggcgcgcttgttgagagcctcgtagaagttgtcgctatccattagaatcaggtgggcgggtttacccacttcgagaccatattggtcaaggacgtgcattgcacgagcaccattgtaagtaatgaatcgataggcattcatgatttcagtatggcccatgatttgggttgccagtaggccactatacaacacatcaagcatgttgccatcgcccattgggtaccatggatcttgaatatcatcttcaccaaaagcgacgtttagcccgttggcagtcagttcttttacgcgcgtcaaaccacggcgcttcggataagtgtcaaaacggccaccgagaaataggttgacaagtgggttggcgatgaagtttaaatccgccatttttaacagccgcatcaatttgtacatataggcatcgttgtaacagcccatggcagttgtgtgtgaagccgtcactttgtctttcatccccgtttcaagggcgagagtcgcgactgtttcaagactacgtgaattgggatcatcaatttcatcggtatgtgcgtcgaatagtaaatcatattcttgagcgagttcaaaagcaaacttcaaggattcgacggcatattcgcgattaaattcgaaatgtggaatagcaccgattgcatcaacccctaattgggcagctttggtcattaatgctttgccatttggaaaagaaagaatcccttcttgaggaaaggctaccagttgcaacgtcatccaatccttgacttcttcgcgaacctcgattaaggctttgagcgcaactaagtctggatcagtcacgtcaacgtgtgagcggacgaattgaatcccatggctggcttgtaatttcagtgcttgaattgcgcggtgtttgacgtcgtcgtgggttaaatcctttttgcgttcggaccaaatccgaatgccatcaaacaaggttccagattcattccattcaggctggccggcggtgagagttgaatcgagatggacgtgaggatcaacaaatggcggtaatgccaattgaccatgtccgtcgatgacttgctcattaggatgcggtattagctgtgcctcaattgctgtaatgatcccgttttcaattctgattgactgcaatgattcttgattctcaatgtgcacgttttgaatgagcattttatccaacctcgctttttttattagtgagtataacaatcatgagttgactttggcaagtaagtttaatacaatgcttataaatataaatccttttaagggcagtccagtgaggctgacaaaggagcggttaacaagtacattagtggacctgctctgtctaggagtaggtctttttttaatgcaattaaccaagtggagggtatcaaaatgacaaagcaacaaacaattcatgcagtatccaaggacgcacgaacgatgggcagttgggatttgttcgcaacttggattggtgcaaatgcgaataacggcacttggtttatcggcggcattattgcggcaactggcttgattcaagggtctacgttgttactagttgttggctgtttatcgtacgtcttgcttgcactggcctcctacatggggtatcaaactggtgtgggggcgatggggctaacgcgggcctcatttggcgtgaagggatccgtcttgccatcgattatcaatgtggtacaattcatcggttgggctgcggtgaatacgtatattgcagcaacttcagtgagcttcatcatcaaggaaatcatgggctggtcaggcaacgatgcagccactaaccggatgagcttgattgttgggattctaattatgtctgtcctgcatttaatcagtatttcgctcggtgaaaaatccgtccgctggattgaacgaattggcatcatcttagtgattatcttagtcacttgggaatcaatcattgtcttcaaaatggtaccgttcaaagacttagtggcgtggcgaccagccagcaacttgcggcttgaatttgggaaggcggtcgatatcctagcagcgtttaaccttgcatgggtaaccgctgctgcggacttcagtcgtttttcaaagaacaagaaagcagccacaggctattcattcttaggcgccaatattggcctgttctggtttgctttcatcgggttaacggcgacaattgccacagcgattacgttaaatcattttgacccgaacaacgcggatccaagcaccattgcggccaaattagggttaggtgttttagcgttattagtgatcgtgattaccagtacgacagctaatgcggtgaatctaatggctgcgggatcggctttaaccaatatttttccgaaatttaaattaacgccggcattgtgggtcgtgacgttattggcaacggtgatgacctttattccggtctatgttgcctcatttttaaccactttcgaaaccttccttgatagtattgggatgttcttaggacctgaaatcgcagttttcttggtggattacttcattattagacggcggcactacaatgttggtgcgctcaatgaagttgctggaccatactggtacaccaaaggatatcatctgacagccatgattgcatgggtcattggggtggtcagctacttggtcttaaatcaattcgcgattattcacgcttatacgggggcaacgtttatcgcaatggggctgacagcacttgtttattggttaatgattcaaagaaaagaaaagacaatttaagggaactaaaaaaacgtcttaattaaggcgttttttttaatttttaccacagagttcatataattttcatactttagttttacactatctttattaggaggtgggtcatgttcttcattaaatcaattccagctaatattcggtattatttacgccaatctttgttaatctatctcgtggattgcctctttttaggcgtcatgctgattgcgctgagcttgatcagtttagaacgacatgacctcaaccagttgaaaaagcaattagccaactttaacacaactaaagaggggactaaccccctgacacatctggttcaaagtaaagaagtcttactgggacgctatcaatttatcgcggtagtgctgactatcgttatcgcacttgtgattggtattttgacttggcaagcgtttaagaagatgcgtcaggatatcgatactttcactagtgcgaattggtcgcgacatacaattgtcaattattatacgttaacggcgctttgcttactaatcagcgcaagcgtgacagtgattttaggttggttattagtcaattcctactattggcgcggattagagctgattaatcaacagtggctacaaaagccgttgcgaccaatacaaggtccccgagcatttcaaccgttatttaaaaatcatctgactgactttagtagtcattcgttattgaatccgattttgcatgagagcaccaagcagaatttaaccaatcaagtattcgcccaactatgggcaccatttatcagtctaattgcaccagtctacattattggttggtgccaagttactcgctttaggaaaatgagaaaggcgtgattgaaatgctaaataaacaacccttagcacttggacaggtctattttagtcaaccggagatgattcagcagagccttgaatcacctgaacccccatatgtcattgattatgaggcgcctaagattctcccctttatgtccggttgggataacttgttgcttcctaaaaagcagcttgcaccaacgttaaaaatattgattgaacagcatttaaagcgcagtcggagtttattgggcaccgaattaccgccagtcgatcagttctggattcaattgattcgcggtttagcaagccaccagcaactcgtggtggtcaagcatttcttagatgaacttccaccaacggatgctcgccaattattaaatgatgtcagagcggtagcagcgcagtttcaaattatcgtaatcatgacaacgactcaggaatccgtttttaatagttttcaatcgcaggtgattagctaacgtcaaaaaaacgcaaggacaatatatgttgtccttgcgtttttttttgacgattattccgtatcgctagttgctgttgcatcagactcttttttcagggcctttgattttggcacttccgtgaggcttgattgatcacccgctaattctggagcatcggttttaaagagcccaacagtcgattgatcaccattttgcgagaataaactggttgaattagcccctaatttattttgaatatcgacaagctgttgatagccagtcagatagttataatcggcagggttcactggtttaaaactttgtggtgtatagaaacgtaataggttcttttcgttaactgaatccgacaaactcaattcgtggttcacttgtttctgccaagcagcgacttgtttttgcaacctagctgttggttcagttacttctgtcccatcctgattattgtagatggtgccatcgagtactgtgtaatcaggagtgacaaagttatggtttcggaaagccacgacttgatcatgttgtggtgataataaatcggtgccgaattggacgtaatttttattatcaatcccgagtaagtgaagcattgttggtaacgcatcgatttcgccaccatattgtttttggataccgccttttaaaccgttcatgtgaatcatgtaaggcacacgctgtagttgggcgttatcgtagtcggtccacgtttctgggtcgcggcctaatacactgagtaaggccttattatcagaattcgaaagaccgtagtgatcaccatagaggacaatcattgaattatcatagagcccagaggctttaagataattgaagaactcttctagggattggtcaagataatgggcggtcgcaaaatagttgttgaccgctgtattatcagttgtggcacgggggaagtcaccgtctttttcgggtaatgggaatggaaaatggttggtgacggtgatgaatttcgtgtagaacggctgttgtagctgttcgagatacttaatcgattcaccgaataataatttgtccttcaagccgtattgtaagacgttatcaggatcggtgttaaagtaggaagaatcgaagaagtagttgtagccaaagttcttgtagacgttattgcggttccagaaggtgcccacattaccatggaaaacggcactcgtatagtcaccgttttgcttgaggattgatggggcagcttggaaggtgttatccgaaccaagcgttgtaaagactgagccttgtggtagaccgtagacgccggtttccatcatgttttcggcatcactggttttaccttggccaacttgatggaagaagttttcaaaacctaatgtattttgatcatgatagaggctatttaaaaatggcgttacttcgcggccttcgaacttaaagtcgattaggaattgttgaaaactctctaaatgaatgacaatgacgttcttgcccttggcaacgcctgcgtattcagcgttcggtgcagcgtaatgctctttcataaagtcgagcaccggatctaagtcgtaactctcagcctgggcacgcacttgattattctgagtagtcttgaaagcatcgtagacggtgaaggtgtcgatgccgaggtacttaacgatgtagttccgatcaaacgtccgtgataaaatttgaggtcggctgatttcacttaagccaaggttgatgccaaataataagacggccagtgaggtaatactgaaggcccaccaccgattaaatgcgtgtttgtcgatcttgatgaccttggttaaaatcagcaaggctaagacaataatatcaatccaatacagcgcatcatgccagttcatgagggccagtgaacttttgctgagcccagccgaaacttttgaataccctaagatggtgttgatggtcatgtaatcggtgaattgccggtaatagatgacattaaaatataaaagagcggtgttggcggcatagataatcaagcccaaccaataactgagatgcggctggcgaacataaagaatgatgccgaataaaaggagcgtcgtcgcgaccggattaaagattaaaatagcaatttgtaagaagccactagctgcgaggttaaaatcggtgaagtacccgaataacgtttttagccaaaataaaaagactaacaaactcatgaagcctaatctcgtggataggaatgatttaatttttgtgagtttcaaataatgtgacatcctttcaaaaaacagaactaaaagagcgctaatgccttattttaacccgagggcggcattagcgcaaatagcagtttaaagtttaaacagaaacttaacgtttcgcgggccgcatgatggcatcgtactttggattcagttgatctggcgccaaaacatgttgataaacggcttgtaattcatggccgatttctgtaatactcttagactgcgcagtttggtagccttgagctgttaaatcgggaacggcattagtgaccatcgcttggatgagttgactgaattctgcgttagtgtgacccatgtagcagttttgttgatcggcaagccagccatggtaaaccggaatatcgcgcaccaacactttttgatgacttgcaagggcttctaagacgacaatcccttcagtctcttcataagaagggaagaaaaataagtcagcattggcatacgcgccttcgataatatcgcctttgatataaccagggaagatgacgttgtcgggatgatcctgtttgacaatccggcgaatatttgctggaatactgtacatgggtacatctccaaaccagataaaggtgtattcgggtagacctttggcgatttcgacaaaatcgagaagccctttgcgtttaaagaagaggccgacgcagataatcactttttgatcaggctttaaatggaagaaattccgaaaagcggcttctttagctggtgtggcttgatacttggctaaatcaatgccgtttgaaatgggagcgatagggttggttagaccatagctttccaataatgattttgaataaggggtgggggtgattaagtggtcggcttgttgatagaggctaacgaggtaccgtttaacaaatggagcgagttgattggaaccaacaaaggagttgcgaaaatcttcttcggtcgaatgtgcatgataaatgacgggtttccccattttacgcgcctttttgatgacactgcggcttttgagtccgtatgtattgatatgtaagatatcgtaatcttgatcattcggatcaagcgtatagtcaatccccatttcggttaacgcgcgtttttgatgatccaacgcccgcccaattccagatttagcgagtaatttttcactttcaaaatataatagaactttcataaaaggctcctgtttcaagttatagtaatttctattatagcatagcacagtaggcacacatcgggctaaagttgggcagtcgatacctaatagtttaagattcactttagtcgagtaattaagcgttatttattgaaaaaaaacagctataatggacttaattactcattgaataatgaacagataggttaaattagtggaataagtgaggttggttttttggtatttcttgggcgtatttatgaacaatggatcctcccttggggggaacagtataatcatttaccactcatcaaattgacggtggagagtttagataagacgattttgtattgtttggtttttattgtgtgccggttggggtacttattaatgaaacgacgcaaaatacagcttctcccagaactgaaactattgttatttgtgttttatattgccttattggtctcgttaacggttttacggcatatttattatccgtggcaaatgcagttccatttgcaacgaccacttagccaaattaatttgacaccgtttgttgagactttcaagttacggcaagcgcccgcccagattgattattggtataacttctacgggaacattgcgtggtttatcccgtttggtttattgcgacggtcattgacacagcgcaaaggggatcggttgattacgattattgaaggggctctgttatccctgtgtattgaatccgcccagtttgttttaggaactggcatggcagatattgatgatctcatgtttaatacattaggggtgatgattggcgtcctgttatatcaagtcctacaacatgcaaagcgaaaacattaaggctatcaacggtaagaaaacgcttatcgttgattttttttactaaaaaaaacgcttttttacgtaaaatttacgtaagcgcaatcacgactgggacagttgcttacataacggtagtgaaggctagtaacgattgaatggtgccgttttcctactagccagcggatataaaactatgtataatggattcttgtactttagagaagaagaggaatttataaatggctattttaattgcattaatccctgcacttgcatggggtagtatcgggttagtgagtggcaaacttggcgggaatgcctatcaacaaaccttaggaatgacaattggtgcgctggtttttggaatcggtacctttttagtattacaacccgctttaaacttacggattatggtaatcggtatcatttccggtttattctggagcattggtcaaggacaacagttccaatcaatgcaagcgatgggtgtttctaagacagtcccattatcaaccgggatgcaattgattgtaaacactttagcaggtgctttgttattccatgaatggaagacaacgcacgattacatcttcgggattactgcattagtgatcttaatcgctggtgccacgttaacttcaatgaaggatccgaagagcagtgttgctgctaaagaagatacacaatttgcacgtggttttagagcattaatcttatcaacaatcggttatggtggttacacaatcatcgttaactggtcacacattggcgcaacatcaattgttttaccacaagcaattggaatgttcgtcggtgctgcaatctttgccggtgttggcattgggacagcggtcttcaataagaaaacagcactcaacattagtactggtttattatggggtcttgggaacttatttatgttgatttcaatgaatgatattggtctagcaattagctattcattatcacaatgtggcattatcatctcaacaatcggtagtatttacctattgggtgaacaaaaaacgaaaaaagaaatggtttacgtcacacttggctgtttattagtcattgtcggtggggtcaccctcggtatgatgaagtaagcaacttactaataagtcacctagacaaattgtctgggtggcttattttgtttagagtgtgtattattctataaaaaaggcaaaagaagtgagtcagatgaagagaacaaataaaacagctgtcagttactatttattgagtgtgctagttcccatgttattaatggtggggctatatgcaatgctccaaatagtgccatttggacggcataatttattgattagtgatctcggtacccaatatatgccctttttggcagagtttaaacggcaaatggcccagatgaatttcagtacgtattcattttcgctttcactgggtggcgatatattaccgctagcggcttattatttaatcagtccttttaatttactgctcctattttggtcgaatagccagttgccagtggtggttgggtatgtcattattttgaagattggggcaatgggtttaacgatggcccattttctaaagacgcgtcagcctgaatatcatttttccgcgctaatttttgcaacagcttatagtttaagtggctttgtggcaatgaacttttataacctaatgtggttagacgctctgattttcctcccactggtcatcttaggattagaacggctatttttaaaagggcgtcctggcttatatatctggatgttggttgccactatctttaccaactattacttgggttatatgtcatgtctatttgccgttttgtatgcaattagtttgttaatcaaatggaaacaaccccaacagtcttggtggcaactagtggttcactggcggcaggctatctggcagttttgttgggcctcattgattgcggggggcacaacagcagttgtattattgccgtcgttacttggaatgttgaagactgggaaaaagacaatcgctgcaaccagtttttatccaaccccgcagtttggctgggaagttttgagccaatttcaagtcggcggcagccattatacgcaacgcttaattcatgaaccaactttatttatcagtacattagcgctgttatttgcggtctattatttctgtctaccaaccattcgacggcaagcaaagtggtcgaacggctttttaattgttagtttagcgttaagtttctgggtaacgacatttaatacgatgtggcacatgttccagcaaccagaagggtttccatatcggaatacctatttgatggcatttgttctcatcaaaattgcctatgaagcaagtattgaaccaatcggtaaacgtcaaacgaaacgcctggttattttgatagtcggtggcttgctcagcattggccagttggcgctctactatgggccacatgtacgtggtgtgcagaaacaatcgctctggttgttaatcggactaatggttttggctagcgttatttttgcagcgtggcaaaaaggagcacgttggcaaccatgggtgattggtctgggagccgtattgacgtttagtgaactggtgattaatggccgcttgacgaccactaagttaccgatgggcgatcaagttgtttatgcgcaacaataccaacgccaagcagcactctttgaacagcttgaacggcaaacacctgatttctatcgcgttaataaccaagcgattctcttaaaaaaagcgtttaaggaaccgtattatgggtacaatgatgcgttgacctttggacagtatacattaaacaattattcttcgacacttgatgagcggatgcggacgatgttggttaatctcggtttttatagtaagaatgcccggcggattaacgggattgggcatactgtgctgactgacctactatttgccaatcaatatgacctaattgctaagcaaggacaggttgtgacacaaccccataaaacgttaggcttagggtttgcggttaatgaccagctagcacacgtggctttgaaagcacatgaaccgtttgaaaatcaagatcgaattatgcaagcgatgacaggacaaacgacaccattttatcaatataatcaattagatttacaagcgcaaaaacgtcggcaaattacgtttacaacgcaagttaagacaagtggatatgcttatctatacttgccgcaacaaaacttatcaaagctgaaagtgaaaattaatggccgaacacataaagtaccgattgaattgaatgggaccacgattattggtttgggtcgctatcaaaaagggcaacaactaacgctgacaattaccagtcggcaacctaaagcctttcgtaagattcaggtggctagtttaaaccaggctcatttcgatcaagcttttgatcagttggcacaacaacgcttaaagatcgacctaaaacaactgtcggcagataatggtcggattgctggtgtagtaccagctaagaccgctgatcaattactttatctaagtgtgccatatgacagtggttggcatgcgcaagtcaatcatcaaaaagttcgtacacgacgagtcatgggcaatatgcttgcagtgccacttgagaaagggactaaccaagttcgcttagtctatcgtgcgccgggactaattatcggcgcgatcatttcaacatttagtttaatgacatggggacttatcttaattaagcaacgctggtattaaaaaagcaggttaacgatgacaatcatcatcgctaatctgctttttattgtggcttatttggggtgtagttgagtggctaagccaagaccaattaaggtcaggccgagcaaactaataaatacgacttggtaaccggcgacacttaaaaggagagttgcaagggtgacgcccagcgcgcccgcaatttgacgaatcgtggttgtgacggcagtgccgtcagcgagcacttgatccggcaggctattagcaccaagtgtaacagcaggcatcatgacaaatgcgttgccgccttcgatgaaacaggcacacaggatcatcaatggtaatgacagccattggtagaagccaatcaaagctagccatccaatgctaatcatggttaggccaacgagtaaggtcggtttaaagccaattttatcagctaaccggcccgcgagtggattcaaaaggcttaacacaacggcagcagggaccaatgctaatcctgaaagaagcggcgtcaacttcaattgagcttgaaaatataatgggtagatgactgtggtgacaatcaatgaaatataggaaatagcagtcaatccgaccgcaatatcgtagttaaggtaactgagaatatgtaaattaagaagtggcgttgtctgggtgagttgccggtagacaaaataacccagtgctaggcagctcactaatccgataccccagagcccgattgggttgatagtgggatgattagcgctactgatgacatataataaaccgattaatccagttgtacataaaacggaaagaccatcaaggtgatagggcttagccggcataacatcagaaatagtgaagttagctgttgctaacacggttaagataatcagaataaaggcgatgaatagtcctcgccagctgaagtagttgagaataatccctgaaataatcggcccacaagctagtgcagagcccattactaaaccagccaggcccataatttggccccgttgattttcagcagtaatggttaataagacagtttgaaacgatggaaataaaacacctactgcgatggcttccaacgcccgcccgaacaatacccaaccgaactgattagcgaagacaattaatagcgttccaatagtaaataaacttaaaatccccatgtagagtcgtttgaatgggatgttgtttaataaccaaggactaatcggcatcatgacacacattacgagcataaaaccggttgtcagccattgaacagttgtggctgataaatcaaaataggccattaaagttggataagcagttgaaagggcagattggctgatagacattgtgaacgtgccggctagtagggtgaatataaatagttttagtgctgttccagatagataacgttggttggacaagtaatcagatcctttttttggcttgccttaactataggacgtcatgttttatttgtaaaatgaaacgcaatttgaaatcgttatcggtaacaaaggctaataattagccttttatctgtatttagtatatatttatactcatgataggcatttagatattatattaaagggggaacgaccatgagtgtcaaagcggatcaactatcgactcaggaatacatcgtacggtggaatcaatttttagaacggtttatcgtgtttgaaacagtatttagtgagtacacccggaccagcaagaacatcatcaaagggcgctgtctggtgggcgaaaatttggaatcgttaaacgaatattttcaacgtaacttacgggtttttaaacaatttattgatcaagtcacattactaaatccgccaaaagaattacgagaaattaaccgtcagttacaattagtaatgactgattacgtctcgtccgctgaagccatggtcaccgccttcaacgagggtgatgagttaaacttatatcagaaactcacaacgagccgtcaacaacaaaagagtgatcgaacacgcattagtgaacttttaaatcaaatcgctgtttttaaaacacaggcggtcaaataaaaaaaagacacccatctggcaactctcagccggtgggtgtcgttttttttgactagataattttacgccgagcatgttcgataaatttaaacttatcggcacggtgaatcgattcggtgaattgaaggagggtattatcttgtagatgggtgacacctttaacactgactacggagctgttaggcggtaggttcagtatctgacactgttcttcagtggcgggaatcaccgtgaactccttactgccatacccaatttcgagtttgagtgtttcttcaaagtaacgatagagtgagtcttgtgcaaccccttttgaaatgtgggggactatgctagttaagacgtagtcattatcgattaccaggggctgaccgttaacgacgcgcagccgttgaatgtaagtggcaggtaactgctcttcagattcaagatggaaaagggtttggggaacggtcgtctgtgttaattgcaagacttgagtgtcagtatgcatatcgaaaagactatctaattcacgataactggtcaatcccgaaatcggaaaagcatacttgtctagaccgagaaccaaagagcctttccctttaattttatggataaagccattttcaagtagactacctaatgctttacggacggtttcacgcgaggcaccgtagagttcagtgagttcattttcacttggtaagaaagtgccgctttgatagagttggtgcgtaatcttgcgcacgagatctcgataaatcatttcatattttttagccattcgatattctccaatttgttttctcattcctatcataacggggattcggtgaagttgcaaggttagattaagcgctaacaagaaaacggttttaaaaaggtttgacaacttgtacgtacatgatatatgattacggtgtactaagaaagcgcttttattcatgctacttttaattcaataagattcgggaggaattattatggctcaaaaggattattcacaactcgcacaggcaattgtcgccggtgtcgggggcaaagaaaatatcgatagtttaattcactgtattacacggcttcgtttttatctaaaggacgaatcaaaagcgaagaccgaagaaattaaagcattagatggggtcattaacgttcaaaaggcctctgggcaataccaagtggtcattggcaaccaagtcactgccgtttatgatgccgtgattgcagaaatcgggacagagtttgctgacgaagatgaaacggcccaagttgtggctgcaacaacgcgccaacaaaatttaacgccatggggccatgttaaagaagcctttaatcaattaatcggcgtgattaccggtgcgatgagtccgattgtcggtatcttagctgctggtgggattttaaaaggtgtcttggcaatgctaacgatgccacaacttggggcgctattaagtgctaagagtgaagcatacatcgtcttaagtgcgatgggtgattctgttttctacttcttgcccatgttagttgggttcactgccgctaagaaattgaagggtgatccagttttaaccgctgttatcggtggtgttctggtgcatccttcattagtggctttaaacgggaaatctttacttgaaattgggtcattaaacttcccaatggttaactacacgtattcgatttttccaatgattctcgcggcttggttggtcgctaaattaaccaaatgggttaagggctggttaccaggctacttacaaattatctttacaccattgattgtgattgcagtcgtttctgccattacgctttacatcacagggcctgctattatttggttatcaaatggtttagcattcgggattcaattcttattattaaagagtggttggttatctgggttattaatcggtggattctatcaagtgcttgttatcttcggattacactgggggatcttaccaattattgccaacgatgttgccgcaacgggtcacagttacttgaacgcgattttaagcacaacgatgattgcacaaggggccgctgttttagctgttgcgattaagacccgtaaaacagctttaaaagaattatcatttgctggtgcgatttcagcattctgtggggttacagaacctgctatttatggggtcaacttgaagttccgacgcgtcttcattgccggtttaattggttcagccgctggcggatttgtcagtgggttattccatggtaatatgttcggtttcgcggggtcgtggatcggctttgcatcattcttagatccaaaacacccagcagatttatcaaacttatggattttcattgcatcatcagcggttgcaacgattgtgccatttattgtaacgctcgtttggggttataacgatcaaatgacagctggtgaagcaatggctaaaccacaaaaaccaggaacagcaaaataaacgactgaaataggagagatatcgtatggcatggtggcaaaaagcaacagtttatcaaatttatccgcggagctttcaagatgccaacggtgacggaatcggggatatcaacggcattattcaacggttagattatttacaaaatcttgggattgaattgatttggttgacgccaatgtatgtttcccccggtcgtgataacggttatgatattgcggactattaccacattgatcccatttttggtgatttaaccgattttgaacgactcttaaatgaagcccataaacgtgggattaaaatcatgatggatatggtggtcaaccatacttctgatcaacaccgctggttccaagagagtcttaaaggcaaggataatccgtaccatgattattatttgtggcgtgatccagtagatggacacgaaccaaataattggttatccaagtttagtggcagtgcttgggaatatgtgccagcacttgatcaatattatcttcacctatacgaaaagagcatgccagatttgaactggcggaatgaacacttgcgggccgagatttttaaaatgatgcaattctgggcagaccttgggattgatgggctacggttagacgtaattaacaatatctcgaaggataaagacttcccgaatgatacgtttaaaacgccaagcgatgatgggcgcaatttctatacgaatggaccacatgtgcacgaatacattcatgaaatgtacgaaaaggtctttggcccgaaccaatttgtcacggttggggaactttcctcaaccccaattgatgaagcgattcgttataccaatccagcccgtgaagagttatcgatggcgtttaccttccatcatgtgaaggttgattataccggtggcaaaaaatggacactaggcgattatcggctgtctgatctaaaacgggtgcttagtgattggcaaacggggatggctgccggtggtggttggaacgcattattctggtcaaatcatgatcagccgcgtgccgtttcgcgcttcttggatgacggtcaataccgcgatcaatccgctaaattattagcattagtcgaatttggcttacaaggcacaccgtatatttatcaaggggaagaaattgcgatgaagaacgcgaacttcaccgccattgaccaatatcaagacgctgaatccatcaatgcttaccatcaaatgctaagcgatgggattgatgaagcgttagcgattaagattttacagcagaaatcacgcgagaactgtcgaattccgatgcaatgggatcaaacggcgcatcacgggtttacgactgggacaccatggttaatgccggttgagcacgatgattactcagttgccgctaagattcatgaacccaatagtgtctttgcattctatcaagaattagtgcgaatgcgtaagcttatgccagttttaattgaaggggactaccaattatttgaaccagaggacgaagcggtttacacttatcaacgacacctagatactgaaacgattcgcgtgatggctaattttactggtcaaacacaagtccgttcaataccacacgtcaaggacgtgctcatggataattacgaacaaccgcagtttgatggtcagcaaatcactttacgaccttatgaagctatcatgatgcgggtttaagaaaagaggaagaacgatgtttaattttttgaaaaaaggaccagttggacaggtaacagcccccgttgctggcagttatttaccaattgaacaagttaccgatgaagtatttgcaagcaaggcagttggcgatggctttgccattacccctgatgaacggcaaacaacgattagcgcaccaattgatggtgttgttagttcgattttccccactaaacacgccatcatgattacaacaaaacaaaatgttgagattctgattcatatggggattgataccgttgaattgaagggcgcgccatttacgatgcacgttgaagcgggtgatcgtgtcaaagctggcgaagcgattgttgatattgactggcaacaactagcagccgcccaaaaggcaacgactatcatggtcgtcagcagcaacgccacctttgcaccagcagagccactaccaacaacagttacgactgacaccattattggacagttcgacttagcggcagaataggtgggttaagatgcaaccaatcattattgaatctgatgatttcgggatgaccataccgatttcgcgcgcaatcataactggcttaaaaactggcgtgatttctaccactaatgcgcaagtgacatcgcctcattttgaaatgagtgcggcactcgcccagcaacatgggattatggcaatgggattgcacttggtcctcgacaaagaccgcccaattagtcagccactgacgattcccagcttggtaaccccggctgggttttgtcatgcttatcaaaccttacaaactcatccaaaacagttggccattactgatgttaagcgtgagtttcaagcgcagattgaccgctttttggagagtgggttacaactcacgcatttgacatcgcaccattttgtggcaacgttaacgcctgaaatctatgcaattgttctagaactagcgcaaacgtatcatgtccctgttcgcaatgaaacggcgcatttaagaccgacagaacaagcggcctacctgctattaatgtcggaatatgccgttttaacgactgggacgttgataacggcgcaacaaacaccgtatttaacgccacaggaaatcaaacggcaactgacgcagaaaaatttggtaggtacgccggtgatcttaagccatattgggtatttatcggcagagttacggcataagagtcgtctgacgacgaatcggctagccgaattcaatgcgcttaaaacattaaagcaaaccaattattgggatcaatttagttggcaactgacggattactcagaattaggagcgaagtagcaaatgacacaatatcaacatttaacggtacttggtgatagcatcacggatcaacgtaatcattacgcacacaaatggtactaccagtggttagcagaatggctcacaattcccacaatcaccaatctcggaatttcggggtcgacgattgcccaaccgtatgatccgatggttgaacgctggcaagccattcctgaatcaacggatttattattgatttatgcgggtgtgaatgactttggtcgtgatgtaccacttggtcaatttggtgatcagtccacagtaacattctacggcgcactacaaaaattacttgggcagattacgaaacgttacccacaagcgacggtttattttatctcgcacgttcacattgggactgacttcttttcggccgtcaatcaaggcggttatcagcaacaaaattatgaacaagcgattgcgcaagtgacggacttgtttggcgttcagcatatcagtttgtttaacgaatcagcgttgtcatttgcggatgcacaacaagcggctgagctgagtttagacagtctccatcccaatgatgctggccatgaaaaaattgcccagttcttgagaactaaaattagataagcaaaaaggcatcgagctaaaagttaatttaagctcgacgcctttttttgtggctgaatttaagttagattagaacaaatgatgacggatttctttagaagagttggccaatcccgtagtgaatggccattgtaattaaaccaattaggatgttccgaataatggagactttgactttgccatcgcccagtttagcgctgataaacgcggtaatggaaaccgcgatggtgacggcaatgattgtgccggtcatcttgtaggcttcaggcagtagaatcattgtcacaagggggaagacgccaccgaaagcggctgagaagagggatgcaaacgctgcggcccacgggttcatataatggccaagctctaggtcatatttaacattaacaattgttgctaaaggcttcttatgcattaagtccttagcgattgcgagtgccgtttcagaagtgacacctttggcttcgtaaaaagcttggacttctttaatttgatcatctttagctgtttttaagcgtgcttgttcaatggcaacagcggctttttccgtgtcactttgcgaactaactgaagcatattcacccgccgccattgaaaaagcacaggctaataaatcagcaagtccagcgataaaaatggtgaaattattggttgttgcggcggcaacactaaagagcacaccgacaacggttagaatcccgtcattagaacctagaacgccggctcgaagggtattcatcttttcttccatcgtttgatggggtttttcagttgttttgagtggggctttaagaggggtcataaaaaaatcctttctaagcgattattgtttgaataatgtcccaatagcgtaagtgactaccatggttaataatccggaaagcacattgcgcaacatggcttttgaacgattcgctttgccgagagcggctgcactgtagccggttagcgcaagggcaatcatcactgcaatgatggtggcttgcacgcgaatggtttggggtaataaggtgattgcggctagtggcaaaatagaaccgattggaaatgagatgaatgacgcaacagcggctgcgtaaggactggtaaaagcagtcgggacaaacccatatttttcacgtacgacagtcgtcaacggatcagcagtcatcatttcgtgtgtagcccgatcggcaagttcaggatcaatcccagtgttgacgtatttttgccgaacaaaagccatctgagacgcataattactgtttaaattcaatttcgtattaatgattgccatttcctgtgcgtctttttgcgtgctgacagagacgtattcgcccatcgccattgagatcgttccagcaatcattccggcaattcccgaaatgaagatggcgaagctattgcttgtagcgccggcaacaccgataacaattccggcgacggataaaatcccatcattggcacccatgacgctagcccgcatcacgttaattttttgggcgagtgataatttttttgacaaggtgaagcctccaatactttttattactttataatgattataattaataacaactttcattttagtcaatttaatttgaaagtcaagtagcaacctagaccaattaaatttgaaaaatggcttgccttcgagtgtactttaaggaatatgctaaagacattgaagaaggggtgattaaaatgagtcgcattttagtattaggggcagccggacaagtggcccagttagttattgagcaactgttgaaagaaaatcaacatgagctcgtgctatatttacggcacgctgaacggctaagcgcattagcacaaaatccacatgtcacggttattgaaggtgatgtgttggatcaagagctgttggcagacagtttagctggggtcgatatcgtttacgcaaatttaggcgggcagttcgaaccattaatgcaaaacgttgtcgcgacaatgactgcagcgggcatcaaacgattaatctatatcagtggattaggcttgtatcatgaagtgccaggtgcttttggtgagtggaatgaacaagcagtcggtcatgaagtgcggcgggcggcgaagattgttgaacaatcttcgcttaactataccattttacgttgtgcctatatgaccaatgaagatcggatcgattacgaattaactgaaaagggaacaccgtttaaagggacgattatttcacgacggagtatcgcgcaagttgttgttgatttagttaatcatcctgaaaaaggaattggggcaagttggggcattaatcagccgaatattgatggcgatcgtcctatttattaaaaaacttgccttatagtatactctaaggtataagctatttttgtaggagggatgtcgatggcacaagagcagtacaaaatcggcgagtttgctaaattggttggtttgtcgacttacacattacgttactatgaagaccaaggcttgattatgccgcaacgcgatgcggccggtgtccgcttttatacattagaggacgttaagtgggtcgggtttatactccatctaaaagggaccggtatgcggattacagaattaaagcaatatgttgcattgcgggctcaaggagacgcgacgattgaagcgcgcaaagctttattgcaaaaaacaaaggctcaagctgaagccgaattggctgagcgccaagcaaatttacagatcctaacgcgtaaaattgattggtatgatggtaaattggatcagagtatcgatcaagcagagagttttgaaacgtatttacaacgatttgaatcctaataaagtgaggttattagaatggttaagaatgaacaattaaaagaaaaacaattattcccagttggagaagctaatgtggcttatcaagacttcttcgtcggtcaaagttatttatcaatgttagtgaacgaaccagacgtgaatgtcggtgtcgggaatgtcacgtttgaacctggttgtcggaacaattggcacatccatcatgctgggtaccaaattctattggtgactggtggcgaaggctggtatcaagaagaaggtaaagcagcacaacacttagtcccaggagatgtgattgttactaaagacggcatcaaacactggcatggggccattaaggatagctggtttagtcatgtcgccatcactgccggcacaccagaatggttagaagctgtttcaaatgcgctttatgacgcactttaattcagaaaggggtttttaaaatggcaaagaaacaaacagcaggccgcgatctattgggtgattttgcacctaaattcgctgaattaaacgacgatgttttattcgggcaagtttggtcgcgtgaatcagagttaccagcacatcaacggagtttaatcaccatcagtgccttgatttcaggtggtaattttgaacaattaccagcgcatttaaagattgataaggaaaacggcattactgaagctgaaattgtcgaagtgattacgcatttatcattttatatcggctggcctaaggcatggtcggcgatgaacgctgctaaagcggcttatcgaccagaataattaatcagggattaggacagataagattgtcctgatcctttttttgatggtatgatagacaaacaaatcagcatcaagaagtggaggaaaggccttgaacgagccacaaaaaaattataccaacggtgttttaatgactttatcagtgattggaatgaaatggaaaccgttgattctctgtcatcttgtggcaggacctcaaagaccggccgaacttaaaagagtcgttcagggaatttcagccaaagttttaaccgatcaattacgtgaattggaacgagatggcatcattactcgaaaagtttctaacgaacccccacacgtggagtatgcgatttctgcgtacggcaaatcattggtttccgtcctaggaatgatggccaagtggggcgaagatagaatcgactttttacagagcaatggtgatgatgtgcagttggattatcgagaccatgagaaatacgatatttaaagaaggcgataacatttattcaaaaagaatgttgtcgtctttttagtgatttcacaaaacttactttgaggtgcgttagttagttgaaagtgcgtaattgtttattgcgaagtacccgatatactaaccttatcaactaaaaagtgaggggaaaagaaatgaatgatattcaaaataaagtcgttgtgattaccggtgcatcaagtgggattggtaaagagacggccaccttattagcagccaaaggtgcaaaacttgttttagcggctcgacgaacaagtgcgttggcggcgttaaccgctcaatacgacactgaggttatttatcagcaaacggatgtgacgcaattagcagacatgcaagccttaatcgaattgacaatcgctaaatttggtagaattgatgtgctattcaataatgctggcttaatgcccgtctcaatgctacgcgatggtaaagtcgatgagtgggaggctatgattgatattaatatcaaaggtgcgctatatggcattaaatatgccttacctttaatggaacagcaaaagagtggtcatatcattaccacggattcagttgccggtcatttcactggtgaaggcttatccgtttattcagccactaaatatgcaatgcgcgcggtgatggaagggttacgtgtggaagaagttggaatgggcattaaatcaacgttaatctctccaggacatgcgcaaaccgaattagccagccggattagtgatccgcaattacgagcagctgttctcaagagtgaaactgaaactggattaacagcaaccgatgtcgctaatgccgtaatgaacgccatcgatacaccagataatgtgggcattaatgaagtcattctccggtcaattgatcaaagagactattaagccattggtcaaagattgaattgagtcttgacaacgaacgctaaaaataaaaaatattttcgaatggtctagttcagcgcttgcaatcgtaagttaacggcactttcaaaaaggctttaaaattagctaccacaaattgaattaaatacaagagtttaaattagaatgcttagcgtgtaccatatatagtgttgtttcgtcagatggcacatcaatatatggaaaatggtgttgacaatctggagtgataattaaattcatataaagaggggttcagttcaatgcaggacaatcgtgcaatcaccagtgtatttaatcctaagtggtacattcaacagatgaaagggtggacaacatccagttatggtttgttgatgtttgggttaggctttattttagctgctactatttccggtggtccaatgactggcgtgtcgtttttaacgatgctcgcggggatgttaggcttcacctgtactattagtattacgaatacgaaacctttaaacggtgtctttggtgtcatctctgcattaatctacattattgtggcttataatgctaaaaactataacgatatggtattacaaaccgtctacattattatgttagacatcccagtcttattaatgccagattgggcgcaaaacgttgataaaaaagtccgggggcttgctactcgtggtaaaggacttcgtaattgggcgttgacgctattgttctttgttgtatcagttgggttattatatctctgggaaagcaatatgacggacagtccacgaccattgatcgatagtatcgccgcttcagttgggtttactggcgcactgttgaccacattacggtttaaagaaagctattacttctggttcatccaaagtatcgtatcaatcacgttgtggggcattacagcaatgcagggtggctcaaattgggtcttattcttcacctatatcttgtacttatcaaacgacttagtctcattcttcgacaagaacgtcgtttggttccatcctaaagaagccattaccaaaaattaaatcaataaaaatagcgtcccaacacaccgcaatgtgttgagacgctatttttatgatggccgggttgttttatagttcaacaccgttttcttcaaataattctggtaatgtcttcagtgattgaccatcgtattctgcgaagaaatcagccacgctgtattctttgccagcaggacgagaagcatcatagcttgcgctaattgtttctgttaacttaccatctttaatggttagttctaattcttcaactggaatactccgtttgtcagtgatcttagcatcaattaagaatggtcggccagcttttgtgacttcaagggctttgtcaaaggcagcgggtaattctttagaagaacgaacggtgattgattcaatgcccattgcttgcgcaatcatggcaaaatcttgatcttcaatgaagattcctgagtaatccattggaatatcatcttgttcactcttgatgaagtttaatgcggcatttgatgtgatgatattaatgattggtaattggtatttcttttcagtgatcaagtcttgcatgaccattgaaaaggcaccatcacccgagatgttgaagacttggcgatctgggtagctcaattgaccagctaaggcaccaggaacgcctgaacccattgaagcaaagagggcagaaatcacccatttgttcttaggcgttaagttcaagtgacggaaactgttgatgatattatcaccaacatcgattgaaaagacagcatcgtcttcagcaatccggttgatttctttgtagattggttcgaattcaagcggatcagagtcgcggttcgttaaaacatcaagataggcttgccagtttgccatatcagcaacagcagctttgaagaatggtgttggggcaaccgtttcacttctggcgattactttttcaacaaaagcagttgcatctgaccagatcccgaagtctaagaaatggtgacggccaaattgtgcttcatcgttatcgatttggataaacttgaagtcatgtgtccgataaattaagttggcaaatgggaagtcagcaccgatggcaatcacaagatcactaacggccatgatttcatcagccgctttagaagcagcccggttagccatgcctaagttaccttcataactatcaggcactaaccctttagcaagcccagtcatgacgattggaatttgaagtttctttgataattcaacgagcttatcgccgccgtctttaatcccacgaccaacgtgaattacagggcgtttagcgtctttaaccattgctaagaattgatcaacttcttcgtctgttgcgactggaccagccacttttttacgatctgaaggtgagcttgagctatatggtgtatctggaatttcaacgtagccgaagtcatttggaataacaaccactgcgacgccattgtgtttgtaagcttcacggattgctttatcaacaacgtatggcaagctttcaggtgtcataacgaggcggttataaacagcaacgtcagagaacattgggttttcagcgaattcttggaagtagttgtagttcatgttcttgcttggtacttgaccaatcaaggctaaaactggtgcatgatcttcttttgcatcatataaaccagttaaaaggttagttgcaccagggccagctgaaccaaaagcaaccccgattttaccagttaatttagcgtcagcagctgcggcaagggccccaacttgttcgtgacgaatttgaatatattttaaacgatccttttcaatattaagagcattcattgttgagttaaatgagccaccagggtaaccaaagatatgatcaacgccccaagattcgataactctaagcatagcaacactagctggaatagttttttgagtagtaactgtcattatacagatctcccttaaatcaataattaggttgcgcacaaccttatgggaataatttagcatacttagaaaacgattacaagtgttaaacgtaggttaatcatatccttaattaattaaccgctgataaattggtgcttgataagattgaatggatttaagcagcaaaaaccgcgctatccgaaaatggttagcgcggtttgattagtttaaatagtctagtaaagtatcgacagttaatgcttgcttttcagtcgcgttcaagtcggcaatcagtttaccggcttttaacaccaagagtcgattgccatattgcaacgcatcctctaaatcatgcgtaatcattaggcaggtgagttggttatcgcgaattgtttgattggtaaaagtcatcaatgcttggctggaaactgcatctaaagcagatgtgtgttcatctaataacagcaattcaggtttttgaatcgtcgccatcaagaagtttaacgtttgtcgttggccacccgacaagttactaaccgggcgattgagttgttgatccaagtgattcgggagtgtcttggcgagcgctttgatttgtgggagttgttgcttgagacgccggggaaataagcggcggcgttggccacggcgcatcgccaacaaaatattttcggcaacggtcatatcagctgcggtgcccaacttaggatcttggtagacacgactaatgagccgtgtgcgttgttgggcggattgcttcgtaatgtcgtggtcgttgaatagtagttgcccacttgtgggggttaaatcacccgcaatggtattaaaaaaagtcgatttacccgcaccgtttgcgccaaggaggacgacaaattcaccaggattaatcgtgagatttaaatcatttaagagttgtttgggttcattattatcagtaacttcaaaattgaggtggtttaaagtcatacgcggggtcatttggtagtcagtcctttcttttgttgtggtgcgatgatgaagatggccaaaatgacggccgagaagagtttgaaatcattggcgttaaagccgagttgtaagacaaggagtaagatgaggcggtagacgacgcttcctaggataatgctaattagtttggcgatgaaatgcttgccgacaaggagccgttcaccaatgatgatcgcggataacccaatgaccatcacaccgatgcccatgttgacatcagcaaagccgctatattgtgcaacgagcccacctgcaagggcgatcaagccgtttgacagcacgatcccaatcattttcgtccgctttacggcaatcccttgtgagagggccatcgtgggattatcaccagctgcaatcagggattgaccgaattcggtgtagagtaagccagccagtaataatagggcgatcagcatgatgactaggttaatgactaagagccgttgatcgagcgttaattgatggaatagcggcagttgatataggttgtgttgatcaccaattgccatgttggcttggcctaaaatccgcaagttgacggaatacaaaccggttagcgttaaaatcccggctaacaaactctggacatggaagtagttgtataaaattgccgtcacgagtccggctaaacagccaccgatgaatgcgactaataaggaaaaggcaatgttatgttgttgcaacattaaagcgctgagggctgcacctaacgggaaactgccttcaacggtcatgtcagggaattttaagattcgaaaggtgatgaaaacgcctaggcttagtaggctccataataatccttggtcaatggttgagataataagattcatttgagaacagctcctttttgattagcgatttgcattaaactctgcggaattgtgatgtggagggcttttgcttttttgaggtttaagactaaatgtcctttgcgtaaataccgaattggagtggttgcgggttttgaacgaccacttaaaacggcggcggtcatcttaccggtttcaacgcctaagtcgtattggcttaggccgacggttgcgagcccgccatctttaaccatcgtttcagcggatggaaagactggcgttttggttttgtcggtcacatggacgagggtgcccattgcactagcaatcgtattatcggtgggaacgtaaattgcatcgacttttgggactagattctggctgacttgttccagatcgttgactgaactaagactggcctcaacaacggtcagccctttttgttcagcaagttgtttgaataagtgcatttgactggtggcagagttatcactgcttgaatagagaatgccgacggttttcagttgcggcatgatggtttgcattaatgccaattgctttcgaatcggggcttgatcggatacgccggtgatattggcaccaggatgggcgttgttcttaacgagattggcactcgccggatcagtcacggcgcctaagataatcggtaattgcttagtagcattggctaagctttgggcggcaggggtggcaatgccgaccgttactttggctttttcagtgacgaattgattgctcatcagacgtaaattactttgatcgttctgcgcattttgaaaatcaattttgatattacggttgttatgatagccttcgcttgccagaccagcgacaatcccgcgatgaatttcatcaagtgcgggatgagataagggttgtgaaatcccgacaattggcaatttaggttggttggcttctttgatttttttgataccaagtagggtgagcaaactcccaaaaattagaatgaggggtaaaaaacgtttgagtttagacatggcgaaagctcctttaacgtgctttttgaaactgactcttgtgcttaactacatttactaaactggtgattacatcaccaatttggtaaattaggttaatgctcagagtcaaaccgtttcaaacgcacttctattttttaacgtgcttttcaaaccgtattcctgtgcctagctacgtcgcacaaacgaccgactgcgtcgttcattcgcaccactaggctagtgttcgaaatatacccggtttgaacgcactcattattatcaaacaaaaaagtcccccacatgacagtcatgtaggggacagaaaaagcctacatggatttcctcgagttaaaatccatgtaggcttaaaattcaatcgattactgatgaatggccgcatggatacaatcaaaagactgtatccataacggcatacaatctcacttagcggctttgccaacgaatattcaattgtactaagtgagtgtttgtcattttcagtaacctccgttttatttgatgatttgaagtatagcgggatgggtgaaacaagtcaaggactttgagtaattttcttttgaaaataaaggtggtctagtctgaaaaagcggtcgatctggcttgctttttagcgctaaaaaagctaaagttattaacgtatacttgtgtttaaaaacaggaggaataagacaaatatggcacatatttcatttgatgcatcccgtttggacaaatttgtccaatcaaacgaacttgcagaaatgcaagcaatggttaatgctgcagactcacaattacgtgaaggcactggtgcaggcaacgacttccgtggtttcttagatttaccagtgaactacgataaggacgaattcgcccgcattaagaaagctgctgctaaaattaagagcgattcagaaattttcatcgcaattggtatcggtggctcatacctcggcgccaaagctgcaattgatttcttgaataacacgttctacaacatgttaccagcagaacaacgtgacttcccacaagtattattcgccgggaactcaatcagttcaagttacttaaacgacttagttaacttgattggcgatcgcgatttctcaatcaacgttatctcaaaatcaggaacaacaactgaaccttcaattgctttccgtgttttgaaagacaagttgatcaagaaatatggtaaagaagaagctaagagccggatctacgcaacaactgaccgtgctaaaggcgctttgaagacagaatcagatgcagaaggctacgaagaattcgttgtgcctgatgacatcggtggccgtttctcagtattaacagccgttggtttattaccaatcgccgttgctggtggggatatcgaccaattgatgaaaggtgcagctgatgcccgcactgaatacacagatacagacgttatgaaaaacgatgcatacaaatatgctgctttacgtaacattctttatcgcaaaggttacacaaccgaattattagaaaactacgaaccaacattgcaatatttctcagaatggtggaagcaattgatgggcgaatctgaaggtaaagaccaaaaagggatttatccttcaagtgctaacttctcaactgacttgcattcattaggtcaatacatccaagaaggtcgtcgtaacttgatggaaacagttgtcaacgttgtgaaccctaacagcgacattgatattccaactgacgaaaagaacttggacggtttaggctacttagaaggccacacaatggacttcgttaacaagaaagcttaccaaggtgttgtcttagcacatactgatggcggcgtccctgttatgtcagttaacatcccagatcaaacagcctacacattaggctacatgatctacttcttcgaaatggctgtctcaatctcaggttacttgaatggtatcaacccattcaaccaaccaggtgttgaagcttacaagaagaacatgtttgctttattaggcaaacccggctttgaagaattaggcaaagaattaaacgaacgcctataattcaacgtttataaagataaaattcgacttttattaaagcatttagtctattgattttatgaaatggtgcagtatttggtgcattgttctaaaataaatggattaaatgctttttgtttaatacggataaagaataaaatatataaattgcttatttttagtaagccaagtataatgaccttatcaaagatgaccaattcatcaataatattaaaagtaaaaatggagatgatggcaatgttagtcattcaatatctcaacggtcaaacgaacgctgaaaaggtttatcaaaaagcggctgaatttgtcgcaaatcaacaactggaagtacccgatttcgaagattacgtcgcaattaagcaggtgacgttggatgggcagccattaacgttggcggatgcgaccatgcgcagcttatataattatttaaatcaataaagttaatctgaaagaaaaacgtcgctcaagagagcggcgtttttgagttataaaataaaaaagaccacccaacggcagtcttttaattaacgtgtagtaatcataatgagatttgagctgtgataagtttcgctaggactattttcgaggataaaagccggcgtgtccttaacaaagtgcgagatttttgcgacgatatctgcagcagcacagtctctgatggtcaacttatggcgtgaaccatttgtagaaccaaaggcagataatgtgtcattttgttggagcgtaatttttgagccctcgttaaagaataacttaaccataatttaaaaccacctttcgtaagtaaatcatataatattgataagaaaatcacaaggataattaacaattcaacgcccttaatattatccagtgcaattacttttcggaaaattattcgttaaaagaaactactttttctaatattcaaacgccatttcattaaccgattcttccaagccttcgacaacttcattttgttcaatgaacgttaaccaagtttgatattctttggcgtgttcaccacgaatgttgaatgccattttcacttgaatactagcgataaattcggcgaccattttatcaacggcccgatcgaccttattctcgttccaacgtttggcaggttggcgtttttggttcttttcattttggtagtctaaacctttggctcgaaatgtatcgatgacgcgggaatgttcttcaagataggcctgtagttcggcattgttcatagtcgtgctcctttaaactctaatagttagcaagtaaagattttagttcagcttgggcagcggtgtcttcagaaacggcaaagacaagtggttctgagtaagcttgtttgccgtcatcttttagttcgctgaaaccatcattagttgatgtgaggtgaccattacctaatttaagttcatacacgacgccgttatcaccaagtaggtatttgctaaccggtttgtccattgccatgttaaggctgtaattatccgcgaatgatccacgatctaaattgtctttaccgactgttccatccaaagcggtataaaagacacagccaccaattgcatgaacagggtaggcattaaaccctgggcttgctgtcccaggttgaactaaaatgcggccatcaggtgaattggcaaaccaatcgccaaatccggcagcaccgtggtcaaaataccaatcactgacggccatgtttccgattgtggcgcgttcagccgcccacgctagaaaagcttgattaacagaagtttgttggtcggcagtgagcgcttttttggcacttgttgactgattagattgttgttttgcttgttcaatagattctgaagctgcaacgatactttctgattgttgtttaatagaagcttctttcgagctagcgattgatcgacgctgattgctttcttttgcttctgatgaggcgcgatagcgtgctaaactttcggagtgggttgcggcttgttgatcaggtttaattgaccgacaactagctaatgaaagactacttaaagtaatgaaagtgactgcaatggttcgtttatgcatgttaaatcccccaagttaatgattaataagtcattgcacggtgtccctgtggtgcagcaattttccagaatttatcaaatgagattttttttcgtttgccggtatatggatcgttaaaggtaaatgaattttgatcatagccaattaataagacggaatgcgctggttgtttatggtagttaatccaagcgacaattggtttcttttgttttaaagtagctttgagcgtgctaatcggttcgtccgataaatcggtgaaactgccgagatattgatagaagaatcctgtccaagcgggaggatacatagtgtagccagtatcatcgtatggattcccccaaaagccgacctccatatcgccatcattgacataagggatactatcggccacttctgttttgctcatgtcaacgctacggtaatctaacagcatggcaacagccgtaatttcacaaccggttggtaattcaggaaattgtgaaatgggtgtgatgtcgagcatcgtttttttgggtgtttttttcttaacaattttttggggtgtggttttatggaagaaccaaatcccggcctcacttctggtcggtcctgtgaaaagccataaaaaaagggtggtaatcagtattaaaacgactgccacgcgcttgtaaaggtgttttggcatttgataatcctcattctaaatttagtcgacgaaataaatatttaaaatagtatagcatttaaaggggcgtaatagctatagccgctcacggatttcaactgtgatggaatcgccaatttcttttttgagttgtgcacggatgtctttgcggcccccaagaatgtaacaaatgttgccatctggctttttaagtcccatattgacaatactgccatcatagggaatttgttggtcgaaaagggcgtggacttttacacgacccttcccgaagattgcgcggatatcgccaggaaattagacatatgcaccgcctttaccaatcgtcgcggcttggattgaggctgtaaaagtataagtttgctcggtcatcggtcagaactcctttaaaaaaacgtcattaaaaaaagtgaccacggcaaattcagtcgtcacttttagtgattattggaaaaagcgcattaattggcgattaaaacttgcccaccaagtgtttgggtgcaaaagggttgcaacgattgcttggcgatgttgtaagaaccagcgcttaatattttgatcagacaatttagtgatatcaaacggcatttcgaaccactcctaaactacctttattatatattagaaatgggacacgtcaaaaacaaagcattaaacttaaccaatctttaaaccggcttaaggcttaattaataagacgttggtgttagaatgaacactgatgaattgtgcaacagaaccgattaagagccgctcaaaggcgcccttaccactgacaccgagaactgttaaatcaatatgagcttcttctgggatggtaaaggctaattcacgacgtggcgaacccactttaaggatggctcgtacgttagggacaccgtgttctttagcgaattgcaccttttgatcaagatacgattgaacgaaatgtttttcagatgtcgttgtttcagtagggtaagtcatgcgtgcatttgtgtaaagggtatctggaataatttgagccacaactaattcggcattattgcgtttagcaatttcaatcgcctcactgaaagcgcgttctgataactcagaaccatctaaaccgataagaatatgctgataattaaacataaaaaagacctcctttatttaccttcaatatagcattttaaacgaagaaatgccgtaaataagcactttaaattcgatgggggatagctggttgagtgactataacaatttggcaccactaatttgtgccgaccgtatcgtttactttgattgaactgcgccctataataagaatgtgaataatttctcccgaaattttttaaccactatataaaaaaagagccgtcgaatcgtagattcggcggctttctttttataaatgattaattgaaagttgtgtgacttgttgcttgttgttattggtcgtcataacggtatagcgaacttcgcgatccgtcagttgcattaatgacccaggtttcttaagtgagcggtcgaccaattcagtaatctgggttggtttggttccgatacttgttgaaaaggcgaggacgtagtttttaaacgttagattcttacctgcgttgagagctttaattgagatccccagtactttgctatcactgacgttcatggcaatcacgttgttgctgtcaacttgatcagtgcgaatgccttcaagtggattcgcttcgaaaacgcccagtcctttttgttgggcaatcggattataaatctgaataaagttcggccattgcacaatttcttttgcgacagggccttcaacataagttggattacgcatttcttcattatcagcaagtgtaatccggtactgcttagctttgtaagggacttcgaatgcgaaagcatcatcggttgttttagtcgtatgaatggtatcaccgatttgccaataaacctttttatgtttagtcttaccagtgatttgcgcattgaagccactgtttgtttcgtggagctttgctttaaccggattcccacaagcggttaaaataaaagttagacctaaaatcatgaataataatttgacgtgacgcatttctcacactcccaatcgataatagggttaactatgaatcaaaaaataaaagactccccagtcttctacttcattgtaacccatttcatctttttttcaaaatcaccatattcactatttaatactactgtaagaaaatttcaacttctgaattgcgcggacatgtcgttgattagccttgtaaacatcatcagtgtattcttggaaagttccgtttggacgggttgcaacagagacgaacgacccagtcttggataagacatctttggcataaacgagttcttggcgattgttatcagtcgcgtagtctttcattttttggtagtcaccttgagcactgacatagtaatcatcagcgtcatcgagttttccttgtgctagtaaacgccgaccttcagcagcaacagcactatcatgatcgttataatcaacatttgcgacgttaactgttccgttttctgttaactcgccccaaactttattatacttttgagcgatgaattcagtggcaacagtcgattttttaatatgtttgatgaattggcgttcagctttatcgaattttttatctttcttttcaatcttcgctagttcttcgcggtgttctttctgagccatgtagaagttatagccaacaggagatgccgcgataatcaaaccaatcaagcaaataattagaggggctttaagccgttttttaaaaattaagaaaaataggagcaggataatgccaaatgcaaagacagcaaggcctgcataaagaacgatggcgagtattaagtttatatagtaacctccaaaacagtaatcggataatcagggttaatacggttagtcaatgaatattatcccattttatgagatattagcaagtcaaatttacagaaaggtctgtaaaaatatgaatcttctcatgaaagggatttaaacagaaaagtcaattgtttttccttgcattttcccgtattataatatgatacgtaaaaatatgaatcatttataggaggaatagtagtggacgcttctttgacaacccgtttggctgccgaatttattggaactgcaattatgattatttttggtaacggggcagtagccaacgttgaattaaaaggaacaaaaggttttagtagtgattggtttttaatcgcttttggatatggttgtggggttatgattcctgccgttatgtttgggagcatttccggtaaccatcttaatccggctgttacattaagttttgcagtgatgggcttattcccttgggaaaatgttttaccatacatcattgttcaattcttgggtgcaatggttggtcaattattattggttgctgcttacaaaccatattatgatcgcacaacaaaccaagaaggcatcttgggctcattcgtaacaatcgatgctgctcatagccggatgaatggttttgtaaatgaatttttaggcacattgatcttagttttcggtgctttagcaattggtgcaggtaagtttggcgctgccggccacattgttgttggtttattggtgatgacattagttgcttcattaggtggcccaacaggaccagctttaaatcctgctcgtgatttaggcccacgtttggtgcatatgttcacaccgcttaagaacaaaggcgactcacaatggagttacgcttgggtgccagttgttgcaccaattatcggtgccatctgtggtgcaggtattttccaaatgatttttgcataacaaaccgcttctaaaaatagtccgtcaggactattttttttgctttcaaagcaaaaaatacccggcataaaccttaattgggaaaggcctataccgagtatcttctgaatattgaaatgatcttacttgggggagtattaatcatttctgttattgaatatatcataaaataacggaagtttacaacccttttacgtgtaaaaccctaaaaaaataaattattttataataatgcatattattaatctcagtctacaatttatttaacgtgtataatatttcggaggtacgcatattaaataatcgactgagaaaggtgtgcgaccactttagagaaatggtacaatataaaatgttggcgattacatttaaggagagtagcgtttatgattaaatttccagagcattttatgtggggagcagcaacatccgcacctcaatcagaaggatactccctaagttatggtaagtccccatcaacctgggacaaatggtttgagatgcaacctgataagtttaatagcgatcaagggcctgacacggctagtgatacttatcggttgtatcgtgaagacgttgaaaatatgcaaaagattggtttgaactcatttcggacatcgattgcttggacgcgattaatgcccgatggcaaacatgttaatcaagtagcggttgatttttatcgggattattttaagcgcttacgtgatgcagacattacaccgatcattaatctgttccatttcgatatgccttggtggctaatggaaaagggcggttgggagacacgcgaatcagttgatgcctttgcattctacgcaaaaactgcgtttgaattgtttggtgccttggttgatcgctggacgacttttaatgagcctatcgtgcatatcgaatgtggttacttaacgggctatcattatccagacattgttgacttcaagaaggctgttcaggttggctaccataccttgatggcgcatacagcagctgttgctgaatttagaaaagtgaagccggatagtcagatcggcattattttaaatatcacgccagcttacgctaagagtgatgcaccagaggatttaatggctaaacaaaatgctgacttactactcgctaagagttttctagacccaactgttttgggcgttattccagaagaattaattaacctcttaacaaaacatgagttattaccaatgacgaaaaaaggcgaccggcaattgattgccgatcattgtgtcgattttatcggcgtgaactactatcaaccaatgcgggttcaagcaccagagaatccgaagttcccagcacaaacaccggaagacttatatgctaattatatttggccagaacggaagattaatccatatcgtggatgggagatttatccagaagcattgtacgatgtggcaatgatgatgaaaaatgattatcacaacattccgtggtacgtttctgaaaacggaatgggtgttaccgatgaagaacgctttatgggtgaagatgggcaaattcaagatgattatcggattgaatttatgcaagaacatctgacgcaactacatcgtgcaattgaagccggcagcagttgttttggatatcatacttggaccttcaatgattgttggtcttggttagatggttatcggaatcgttatggtttctactgtgttgatttggaccatgaggtaaagcgcacgatgaagaagagtggtcgatggtaccgtgaattgagcgagaataacggcttttaggccaaagaaaaagaaccgacgcatcagtcggttcttttttgagttaaaagatatctgtttgaacatatttattgtgtaattcaaagaaatcataagtcgctaagttttcaatatccgcttcaccattgaagatggccgttgcagaaccagccaacatcaggttaattggtaaattatcacggaaacgagcgagaatcactggtttattgtgggcaaaagcataaccacattcccacatggtaccggaatcaggttcgaattcgccttcttcagatttaaaatccataacagcgactacgacgtctgcttggtcaatttgacgcgtatcaacattaaaagtagcgacttgccattcgaaagtaccgaattctgcatcaggataagggtgttggcctggtttgaaaagtgaatcagcatcaatcgtcgggtttttaatgagtaaatcagccacttgatctaaccgatcattttgttcgggactaaaaaatgggccagcgagataaacttgtttttttgagggcatgagagccgcctttctcgataatgttcgtgttttttgtagtaatttaagcttaaaaaactatttattcaattatatacgtacgaaaaataatattcaatatatgttctgcaaaaaaaatacgtaaaaaaaaactgcttacgcagttttagtgaacgaacaagtaaataaccaatagaataaaggccacaactaagattgtgaacatgtaagttgaagcggtactaacagctttcttacgttcctttgatagtggtcggttcgctagtttcttgtattgcttcttagcaatttcaaattgacgtttatctttcatttgtatccctcgcttgtttcagtgtccctattatagcatggaatacagtggattgataattattgatgataagactggactttcaatctggaacaagctacgataatgctatattggagtataaggaagtaacaaatcatgaaattaaagacaactaaacaaacaactggacataaattatcagttgcagggattttgattacgatgggcgtcgtttacggtgatattggaacgtcgccattatatgttatgaaatcagttgttgaggggaatggcggtttggtaaacatcagccgcgattttatcatcggcagtatttcgcttgtcttttggacgttaatgttgatgacgaccatcaagtacgtcatgattgcattgcgggcggataataatggtgaaggtgggatttttgcactgtacactttgattcgtaagcaagctaagtggctcgtgatccccgcgattattggtggggcgacgttattagcggatgggatgttaacacctgctgtgacagtcacgacggcgattgaagggttaaagggtttgccaattaatgggaacgttttaattaataatcaagatcaggtgattttattgacggtctcgatcttatcggtcttatttttcattcagaaatttgggactgatctaatcggtaaatcttttggtcccattatgttaatttggtttacctttattggtggcattggtttggttaacttaatgggggatctaacgatgctcaaggcactcaatccgtattatgcgattgaactactgtttagccctgagaataaggtggggattctaattttaggcagtgttttcttggcaactacgggggctgaagcactttattcggatatggggcacgtcgggcggttgaatatctatggtagttggccatacattgcgctttgtttagtgttgaattactttggacaaggtgtttggttattacaacataaagatattgcggcatatcaacatatttctgatttcaatccattctttgaagtgatgccagcccaattaaaggtcccagcgattttactggctacaattgcggcgattattgcatcacaagccttaatttcagggtcatataccttagtatcagaagcaatcaagttgcgcctcttaccacgaattaaggtcgattatccggctaagttaaaagggcaactctatatttcaatcgttaactggattctatgggcggtttgtttaatggttgttttctattttaagaactcagcgcacatggaagctgcctacggtttggcgattacgattacaatgttaatgacaactatcttgctattccattacttgggacgccgcgagaagaaatgggtattggcttatttggtactcatcttcttcgggacaattgaagttattttcttcatctcaagtgccgctaaattcatgcatggtggttacgtgacagtcttaattgcggcgtttattctatcgatcatgtttgtttggtatcgtagtaatacgattaaggaaagtaatactttcaaggcaagtacggtttcattactagcttataaacaacaactacatgatttgcgagacgatacagcgttagctatgtatacgactaatttggtttatctttcaaaaccacagaataaaccatatgaaaagaatatggttaagaagaatattctttattctattttggataaacgaccaaaacgggcgcaagtttactggtttgttgcggtcaatgttactgatgaaccgtatacggcagaatataccgcagatacgcttgggacggactacattgtcaacgttcagttgtatctaggctttaagatggaacaaaaagtgaacatctttattcgtcaaatcattcaagaaatgattcatcggggagaattaccagcacaaccacaacgctacacaacaattccaaatcggaacgttggtgatttctcgtttgtgatcatgcaagaagatttatcaccagcaactcaaattcgagcaatggataaagggattgttcaaatgcgtttatggttagaaaaattcactgatacaccggcttcatggtttggattggactatagtgatgtgttcgtggaacgtattccgctagttcttggccgccaaaaatcggtctctaagtatcatttaaaacgtcgtgaataacatcaataaattagtttataacgcctaggacagaagattgtcctaggcgttatttgtgtaatagcagtcaagtaagcggtgtgcattacaattagcgcgggaattgccgtcattttgttacctgtttgtcatcaattgttatggttttgacatgtacaagcgaatataagatggtatattagtcccacgttaataaatcaaaacaacaaggagcacatctattacatgaaatcttttaagacattattgcttagcgctacattgacaacggctgcaacagcaggattacttttcgttggtcaatcaaaagcaagtgccgctactacttataccgttgcaactggggatacgttatcaacaatcgcccaaaaatttgccggtaacacagatttagtcaatcaaattgccacaacaaacaacattcaagatatcaacatgatttttgtcggggaacaattaacaatcgacactgaccaaacagcaacccctgttcaaacgacaacgccagtagttgttgcacaaccagccgctgttcaaacaccagcaccagttgttcaagcacaacctacagtgcaagctgcaccagttcaacaaacagttgctgttgcaccgacaactagttcagcgaaagaatggattgcgcaaaaagaatctggtggttcatactcagcgcgtaacggtcaaatgattggccgttatcaattaaccgcatcatatttaaatggtgactattcagcagccaatcaagaccgcgtcgcagatcaatacgtaacaagtcgttacggttcatgggatgccgctaagagtttctggttaagtaacggttggtattaaaatttaaggttcctttaacgctcaatcaaatttaatttgattgagcgttttttgttctctgagaaatcacacttgactaaatcgaatgtatgttcgtataattaagaggacataagatgaattaaagaggtgtgcctgatgcatacgaataaagaagtgattacgctagatcaaacaggattgagtttatatttaaatggctttggagttttagaattgcggcgattagcggtgaatcatagtgatgatttgattgactcaatgaattattactacaaccgcgataagtttccgcaatttatttatcgtcatctatcagccgtcaccttgattgagattaatcggtggcaacgcgaattagatgaacaagtgcgtcagattcaagttggggtgaagagtcgtgtatgactatcagaatgaaccacgccgcgtgattttaatgattgattcgaaatctttttacgcatcagtagaggccgttcggttgaaactgaatccgttaaaggctattttggtggtgatgtccacggagaaaaacacgggcagtggtttagtattggcagccagtcccatggctaagaaattatttggtatcagtaacgtaacacgtgcccgggatgttccaattcatgataaacggttaatcattgagccacccaagatgaatttgtatatccaagagaaccagaagattaaccgtatttttcagcaatttacggcagaagaagatattcaaccgtattccattgatgaatcgttacttgatgtcacggatagttggcaactctttggagcgacgccgtacgaagtcgcacgtaaaattcagctggctgtaaaaaaagaaacgggcatttatttaacggtgggaattggcgataatccgctacttgccaagctcgcattggatcttgaggccaaacggaatcacagtttgattgcagaatggcattatgaagatgtcccagataaactgtggccagtgacccagttagatgatgtctggtcaattgggcatcgtacggcagagaaactgaatcagaaacacattcattcgatgtacgatattgcgcatacaaatccctatcggttaaaacaagaaatgggtgtcatgggcgcgcagttgtttgcgtttagttgggggattgatcgggccgttgtgcggcataaatataaggccaaagagaagtcttatgggaatagtcaggtattaccacgtgattattttatccaagctgagattgaagttgtgattcgggaaattgcagagcaagtggctgcacgtcttagggcgcatcacaaggcgacaacggttatcagtctggggattggcttttcatttgctgcaaaagagggtgcatcgcgtggtggttttgggcgttcaatgaagattgatgcgactaatgctaatcagcaactcacaaaacatgccatccaactttttcgtgaagaatggcaacacgaatcgattcggcatattagtattgcgtgcagcaatttggttgacgatagtgcggaacaattagatatgttcgacacacagtttattaatttgaaaaagcagaaattagatagcacggtcgatgaaattcgcaagcgctacggttttacatcggtggtcaaattgtctagcaaagtaaaaggtgcgactgcaattgagcgtgctggcttagtcggtgggcatgctggagggaacgcctatgaataatgatgaatatgatcccaatttggttaatcaatttttgaagtatgattattatgatcgtggcatgatgaaatggcaagggttctatttaagcgatcatacggcagtgttagataagaataaccgcgtacaagatcgtaagcgcaatgaaaaacacattgaggcgatgactgctgagatgattgctaataccatcaatgacgcaattgttaaatgttatccggttcaaatcgacaaagcagaacgttcaatagaaggtattgtacccagtaaggtggaaggtttaatcagtggctggtttggtagccaaataattgtggcaaatgaagccattttaatagaagaaatctacgcaataaaaaaactagccccctaactaaagcgtcaggaggctagcttttttacacgttttaaataaacaaaaaagccgctaaaccttagtttaacggcttttctgggttctaggctgttttaaatatcacccgtacggggatcgaacccgtaactccgccttgagagggcgacgtcttaaccgatttgaccaacgggcaatgttcggaacaactaatatcttagcgaataaagcctgtaatgtcaatggttaattgactctagagaggctaaatgaagattttatagttacaacgattaatgttaacaatttccttggtcatggtgcgatttgtttgtctctttaaatgtttcaagatattccgaatatagtcctgatggtttatcagtagatttagaatatcgttatcaattgtgacttcaagcgtcctgcgtgaatctatccaatcaatcacaacgtggtcttgatcatatacggcaactttcccgtcaaataatttttcgatttctgcttttttcatcattggaaccacctccaagaatagtatagtcctcttttaaagatttgttaaaaatcataattgacaacgtctggagtgtgcagtatcatagtattcgttgatgatattgggtattcgccaaattggtaaggcaccggactctgaatccggaatttataggttcgagccctatatacccaattaagatagaaagagctgagtaatcagctctttttttgtggcttcatatcgatagggcagattatttgtagttctctgtctcaaacatgatttggatcgcatagcgatccgcaatcttagctaaagcccgtaaattgaagaaccaatagtgtgctaatagcttacttttgaaaattaatgttttgtcctgagcaccggaaatttgaatcattcgatcatccaatgcgacgtttaaatctaaatcatttaattttaaaactttcattttgatcacctcgtcttattattacgttaaatggggcgattatttttgaaagaaggttaattaattcaaaatagcatatttagcatttttattgactgtaatccttggtgttattagcttttaggccgattacatgtcaattaaattgtgggcttcattacaaagttaggtgaaattgccgtcattttgttacggatttgtcatcaattgttatggttttgatatttactaacggatttaagatggtatattagtcccacgttaaacagatagaaaaatcaatttaaacaataaggagtccattcaaaatatgaaatctttaaaaactttactttacagtgccgctttaacaaccgttgcaacaaccgggttacttttcattaaccaatcacaagccagtgccgcaacaacttataccgttgcaaatggtgatacgctttcaaccattgcgcaaaaattcaatggtagtacagagcttgttaaccaaatcgcaacaactaataatattgctgatattaatatgatctttgttggtgaacaattaacaattgatgctgatcaagtggcaacaacaccagcccctgttgtaactcaacaagtagctgcacctgttcaaacaccagcccctgtagttcaagcacaacctgcagttcaagctgcaccagtacaacaagcacctgtagctgcacaaacaacaactacaacgagttcatctaaggaatggattgcacaaaaagaatcaggcggttcatattcagcacgtaacggtcaattaatcggccgttatcaattatcagcttcatacttaaatggtgattattcagcagctaaccaagaccgcgttgcagatcaatatgtaacaagtcgttatggttcatgggatgccgctaagagcttctggttaagtaatggttggtactaaactaaaataatgacaacgtctaggccattggtctgggcgtttttttatggtaagttagtgattggaagtgtaaactgaaagtagtataaagagtgaggcttgatcagatgaagattttaggagtgttaggcagtcatcaacgagatggggtcaatgggcaacttttagatgccgttttagcaggtgtaaaaccggaagatgacgttgaagtgatctttttaaatgattatcaaatattaccagatactggcaaagccaatccggtattggatgaactggaagctaagttattggcagccgatgtttggatactggctgcgccaacttattggggcgcaatgtctggtgtgatgaagaactttttggattgcgtgcggcaacggttagtccgatttaatcgggcgggagatgcgttaccagatcgcttcaaaggcaaaagttacattacgattagtagttgttatgccagtccagctgaggaattggttactggtgtgactgacgggacttttagaacttttgataaagtcttgggggcagctggacttttaaaaatccgggaagttgtccagacaaaaacgtatggtttaaagacactttcagcgcagaaacaagcggaatgtcgccaagtcggcgcaagcattcaatctaaagcaaagaggacggatgatacagtgaaacggtatatacaactatttggcatggtcgcctgtgcaaccttgattacgatggtactgcaacaattagtgaacttagtgttgccaattggccagttttggcttaattatgtgtcgttcgttttaatcttcttcattctattggcaagtgtgttacacttttttacggtggttaaacaccgcagacattaggagggattcagatgaaaattgcattgattgcacatgatcgtcagaaaccaacgattgtgaaactggcgacggcttataaacctattttggcgcaacacgaattatttgcgactggaacgactggtcaaaaaattattgaagcaactggcttgccgattacacggtttaagtcaggtcctctagggggcgatcagcaaattggcgcgttgatttcagaaaataagatggacctggtaatctttttgagagatccattgactgctcaacctcacgaaccggatgtgaatgcattaattcgattatctgacgtttatgaagtaccgttggcaaccaacgtcgggacggctgaagtattgctgcgcggtttggacttaggactggtcgactttagaaaagtggtccatggtcaagatgtcaattcaattaatttatagtgtaaagcggattgtaccttatttcgactgtgaaatagtgcaattcgttttttgatttcaattttaatttgcgtataataagagtattgatttggagggattgggttgcaaaaagaaatagggtttcatgatcggctaagcacggcgatgtttttaacgtttcttggtggcttcttagatgcgtattgtgtgattttacgtggtggcgtctttgcgagtgcacagaccggtaatatcgtgttcatcggcttagatatcgcaacgaaccagtgggcacaacttcctgaaaagatattacccattatttcatttgggtttggggttattattgtgcagctggcgaagcggcattttaacactggtgggttgaatgtttggcggttgtggttattagggtttcaaattattgctttagtagtagttggttttttatcaaccgcgattcccaacatgtttgtgacaccgattctgtcgatgtcgatggccatgcaattagcgagttattcaacggttaatggctatccatatgcgaatgcttttacgaccggcaattataagaaattaattgaaaatacttatctatatttagcgaccaaagaaaaaaactaccaacaaaaagcccggtacttcgggttaattgttggtagcttcttcattggtactattagctcagggttaattgttaagttaatcaatgtgcgcactgcatggatagctgcgattatgttgacggtgttctttggttttcaattgtattttacagaagaagtgattgctgagaccaaacatatgcaacgttagccgtaataataaacaattaacatggcaatgaaatatgcgccgcaaacagcagtgctaatccaactggcaatcagaatgatgggatgcgcaataaaggcacgcatgacaaagagaaacaaggttaaaatagcatacttaatacagctgacctttagctgttcaaaatgaggcttattcaaaagaaagatccactaaataaagttgacggtcactaagatgggcggtagtaatccacacatcttggaagccgtctttttgtttttcttcggtttgttgataaaaagtcgtcaataagtcatggtgttctttgacgtactcggggtcaatccggttaacgtgtagccgcatatcagggaacagtttctcggcatctggcagatcgacttggtcactaatgccaaagcgaatcacgttcgcatattgaaacggttctagaaccacttcatcaggatgttcttggatgtaagttaagatggttgttaatgcagacatagtcatgcttcctttctagtcgtttaaaaaatcgtaaagccagcagtaatgttattcaacatgtgtaaggcaatattactcttaatattataggtgcgatagtagacgatagccagaattaggccaagcagtgcttttgaaatgaaataaatcggatcagttgcgccgtgcatcaatccgaataagatagcacttaacccgattgagatgattggtgtgcctgggaaaaaccaattcattaggaaccctctgaaaagtaattcctccataatcggacctaagaatagggcgtatggtagcatgaaaataccaatcgtctgaaagactgaggttagtgcatcaacattggcattaccggtagtatgcataaacgggattgtaccgttattgacagcaaccatcgcgataaagccaatcaacattgtccaccaagtctgtttggtgaagggttggtcataacgcgttgatttaattttttggtagtaataccacatcagggcagtaatgccgatagttgtgattagaaaaagccaaccaaagactaaaattagatgggttgtctgttgagccttagggagcaatgttaagccactgacaatcattaaaggaacttgttggatgataatcagaagcaaaaaggcaatcccatgtttaacgtgtttgataagcgccacctccgtgtgcttatcatagcatattcccgtgaatgaataaaagattgaatgcggattgctgttcaaggcacgatgctttatgttagattaaaacagttaagaaaggggtgtttggatgtatttagcaattaaagaaattaaacatgctaaattacgttattcattgatcatttttacgatttttctaattgcatatttaatctattttttaacggggttggcatatgggctagccaataataaccgttcggcaattgatcaatggcacgccaaagaagttgttattagtcagtatgcgaataaaaacttggctgcttctgaattagatgttgatcaattaccctctattaaaggtgcacagaaaaatcatgcgcaacttgctcagatgatgggtgttgtgagtggttcaggtttaagtaagcaaaatacgagtgtttttggtatcgattttgatgtttttttgaagcctaagttgcaaaaaggacggtatcctaaaaaggcaaatgagattgtggtcgacgacggcttacaaggaattgctttaaatcaacaaattaaattgaatgggcgtcaacaaaagtacaaaattgttgggattacgacgaaccaccgctataatacgcaaccggtgacttatttgcggttgaccgattttagccgaatgcgctacggcactgatcagattacgcgcattaatgctttagtattaaagggaaacgcgcggattaagacaacggatcagctgaccaaactgacaattccagaattaatcgataagattccggggtatgggccacaggttaagacgtttggtttgatgattggcgcattgctagtcatcgtcgcctttatcgttgggattttcatgtatattattactattgaaaaaacggccgtatacggggttatgcgagcacaagggatttcaggtggccaattagttggtagtttaatgtggcaatctgtattcttaggggtgattgggattggccttggtttgttgtgtaacgcattgacaacattggtattaccagcggcggtgccgtatacaaataatcctttactaattggggccttttctgctgttttacttgtgatgacagtcattggcgctttattctcaatttggcggattctaaagattgatccgcttgatgcgattggaggggcataggatggctttaatgcgtttagaaaaaatcgtcaaaaaatttggcgcaggcgaccagcaaaccacggctttagatcaaatcgatttaacgattgaaaagggccagttcattggtttaaccggaccatctggttctgggaagacgaccttattaacgattatgggtagtttacaaggcccaacgagtgggaagctcttttttaaagatcaagagattagtcaattaagcgaaaaacagcggtctgcattacggtttaacgatttcggctttatattacaaagttcgaatctggttccatttttaacggttgaagaacaattcgaactagtcgatcgattacgtgaaaagcaagcgccacaatcagctgaacaactattaaccaatttaggtgtttgggatcaacgacgtcagtacccaacgagcttatctggtggtcagcgtcaacgagttgcgattgctcgggcattgtatggtcagccagatttgatttttgcggatgaaccaaccgctagtttagatagtaaacgggccttacaggttgctgagcagctggctaaaatcacgaaagagacaggacagacgattgtgatggtttcccatgatgaacgcgtcttggattatacagatcatcaatacgtgatgcgcgatggtaaactgacataatgcgactcataatcataaattttgactaatgttggttagctatcctatcatataggtagaccaataagaaggagtgattttgaatgacagataaagaaaagttagatggcatgaaagaccaagtaaccggtaaagtacaagaaacagccggtaaggtgactggtgatcgcgaaactgaggccaaaggtaaagcaaagggctttatgggtgaagctaaagaaaaattagcggatgccaaagacaaagttgctgaaaaagccaatgacgtgatggatgatattaaagaaaaaatggacaaagacgataaatagcgccttttaaagggaaccggcagacgatagcctgccggttctttttttgtggatttaatgcttgcatgagtgcctaagttggcgtattatgacattacgtcacaattatgacgctctgtcattaattttcagaaaggagtatcgaaatgccgaagaaaacattttttagattacctgaggaaaagcaacaacgactgattcaagctgcgcatgctgagttttcacgggtaccgtttaatgaagcatctgtcagcaacattattaaaacggcggagattccgcgaggcagtttttatcagtactttgaagataaggcggatatttttttctacgaccttagcttattacgcgacagttcaaagcaggatttagaaaagagtctgttggctgttcatggtgatctattcaaggcaattcgccaattctttgctgaaatggtagaagagattattaatggtgaaaatgcacaattttacaagcacctcttcttacatatggattataagaaccagcgcaagatgtcaccagaattaatgcatgccaaacaagtagatgggatgcgctttttagaagaaaacgtcaattacgacttgctcaagattaacgcagatcaacccgaagcgcttagaattttatttcatgagttgatgacgacggtctttcaaagtattgcagcgtattatctgcaacaagaaagtgaccatgcgattacaattgaacaggtccaagaacgcttcgaattagtattaggctggttagaaacaggggccagcaaacaaggataaggaaagaagggacacacaacatgcttaaacttgcaaagaaaagaatgtcaggttgggccgtctttggtgcggttttattcatgacgattcaggttgtcagtaacctttatttacccaatttaacctccgacattgtcaatgacgggattgctaaggggaatattgattatatctggcaagcaggctttaaaatgttaggtttttcattaattagtattatcgcggccgtctgcaacgtttatcttgcggcacggacgtcacaaggcttaggccaaaaattacgttcagatatctaccggaaggtcatcaacttctcacacgatgaaatggatcaagttgggacgtcttcactaattacgcggacgactaacgatgtggtgcagattcaaaatgtggcaatgatgttcttacggatgatgattatggcacctatcatgttgattggcgcaagtttcttagcgtatcaaaaagatgcgcaacttacatccattttcttggttgtcttaccaatcatggcactcttcattggtggggtgatgtacttcgctgtgccattattcaaggcaatgcagaaaaagacagaccggattaacttagttttccgggaaggtttaaccggggttcgggtcattcgagcattccggcgcgacaagttcgaacaagaacgttttgatgaagctaatactgactacacgcaaaatgcgaagaaagtttatagtattatgtcagtgatgttcccagccatgacgttaatcatgagtgggactaacattgcgattacttggatgggtggacacttaatcgccaatcaagcaatgcaagtcgggaatttattagcgttcgtgacttatgcgatgcaaatcctcatgagtttcatgatgctttcaatggtcttcgtctttatcccgcgggcgcaagcttcagcagtgcggattaatgaagtgcttgatttacacacgccgattgaagatccagcgacgcctaaaacgtttggtgatcaaccagcaagcttggctttcaaccaggtcaacttccgttatcaaaatgcggaacacttagcgcttgaaaacgttgatttccaaatgacagcgggccaaacagtcgccgtgattggaggcactggctcagggaagaccacgttagtcaacttgattcctcgtttttacgatgttgaaacgggtgaagtgacagtcaaagggttaaacgtgaaagatgtgaccctccatgacattcaccaacaagttgcatttgtccctcaaaaagcgaacttatttaccgggacgattcgggaaaatatgcaatatgggaatccgaatgcgaccgatgatgaaatctggcacgcacttgaaattgcacaatctaaagatttcgtcagcgaacttgaaggtggcttagatagtcacgttgaacaaggtgggggcaacttctctggtggtcaacgtcaacggcttgccatcgcacgggcgttggttaaaaaagcggctgtttatgtctttgatgattctttctcagcgttggactttaagacggatgccttattacggaaagccttaaaagaagatgctgaaattcaaaagagtgtcgttgtgattgttggtcaacgggtatcaaccgttgccgatgccgacaccatcttggtcttggatgaaggccagctggtcggtaaaggctcacatgctgaattgaaggctaataacgccacatatcaagaaattattaactcacaaatcagagagggggatgaagactaatggctgaaaaaacaacaaccaatcgaccccaaggtggacatggcccaggccgtggcatgggtggtgtcgttgaaaaaccgaagaatttttggggcacaaccaaacgattattaacctacatgtctagccggttaatcggattagtgattgtgttagccttagcaatcatctccgttattttccaaattagaacaccaaaagtattaggacaagcaacgaccgaaatcttcaagggtgttatgaagggcaatgccatgcaaaaagcgggcatgccgatgaatggcttaccaattgatttcgataagattcaacacattattatgacggtgattttgatgtacttagcatcagcggttttcagtttcttacaacaattcatcatgacgcggatttcccaacaaaccgtctatgaattacggaaagaattaaaagacaagatgcaacgggtaccgattaattactacgacacacactcaaacggcgatatcatgagtcgtgcgattaatgatatggacaacattgcaagtaccttgcaacaaagtttaacgcaaatggtaaccagtgctgtgacatttattggcgttatgtggatgatgctctcgattagttggcaattgactttaattgccttagtcacgattccactcagtttagtcgtcgtcgggattgtcgcaccgaaatcacagaaattcttcgcagcgcaacaaaaaagtttggggttgttgaacaaccaaattgaagaaaatttctctggtcaagtggtcttaaagaccttcaaccgcgaacaagtcacaattgatgcctttgaagaacaaaatgcattactctataaagcagcttggaaggcacaatttatttctggagtcatcatgccgttaatgacgttcgtcaataacattggttacgtcttcgtagcaattgttggggggattcgtgtttctcacggccaagttactttaggggatatgcaagcgttcatgcaatatacgcaacaattctcacaaccaatcacgcaattggccaacttagcgaatacaatccaatcaacgattgcctcagctgaacgggtctttgaagtcttagatgaagatgacatgagtgacgacccatcagaagtgccagcgattgttgatgaccaaaatctacttgaattagaacatgtcgaattcggttatcaaggtaaagatatcttgatgaaggattacaacttgcaagtcaaaccaggtcaaatgattgcgattgtcggcccaacaggtgctggtaaaacaaccatcattaacttgttggaacgcttctacgacgtgagtggcggttcaatcaagcttaaaggtgtcgatacgcgcgatatgactcgggaacaattacggcgtcacttcgcgatggttttacaagatacttggttatttactggaacgatttgggataatttgaaatatgggaacgctgatgcttcagatgaagccattttagcagccgccaaagcagcgcacgttgacggttttgtccgtcaattacctgatggctatgagacggtcttgaatgaagaagcttcgaatatctcccaaggtcaacgccaattattgacgattgcgcgggcctttgttgccgatccagagattttgattttggatgaagcaaccagttcagtggatacacggactgaaattcatattcaacacgccatggaacgcttgttgcaaaatcggaccagtttcgtggttgcccatcgtttatcgacgattcgcgatgccgataacatcatcgtgatgaatcacggttcgattattgaaaccgggactcatgatagtttgatggcacaagatggtttctacgctgacttgtacaatagtcaattctcaggcaacgttaaaatttaagcgtgaatgacgcaaataaggccgcagataaaatctgcggccttatttttgtccgtgtttggcgtatactagtgatattgatgtagtaggaggaatttaacatgcgatttgaacaaaccatccggcaaattgaagcgctagttgatgaagggattgtccctggtgtttcttatgccatcatcgaaggccctgaagtgatgactaatgtaatcgggcaggccgaattagtgccccaaaaagtgccgttaaaagctgatcagttgtatgatttagcgtcattaacgaaagtgattgggacgacgaccattattttacggctattggaaaaagggcggctttctttacgaacaaaagtgcatagtttgttgccggcctttaaagatcgacgggtgacggtcttgcatctattgacgcacacgtccggtttaacaggctacattccgaatcggaatcaattatcggctgccgaattaaaaacggcgcttttgacgcaattaacggtcggcccaaattttggtgaaaaggttgtttacacggacattggtatgttgtatttgggctggatgattgaagccatctatcaaaaaccgattcaggatttgattcaagaactcgttttaaccccactcggtatgcaagccagtacgtttaatccggacaaaagtttggcggtcccgactgaattgagtgccgaacgcggcttaatccaaggcacggtccacgatccgaaaagtgcgattttacaaaatcatagtggtgcagccggcttgtttgccccattaaaagacgttgtccgctttgcccagttccaattagggcagttgaaggttgaacagccaccaatcagtcaggcgagtgttaagagtctctatcgtgattggacaccaaaacatctcgggcgctcactgggctgggatttgcgctttgagccgcaagaacaccagccactgatttatcacaccggttttaccggcacgttcatgctattggatcgcaagcggcaaacggggctgattgtcctgagtaatcgcattcatccaacggctgataatccggtctttttggaacgacgagatgcgattgtggcacaatttttagcggataatcacctagaaacaaaagcctagtcaaattcgcaaatttgcgtattatccgcttacatttgtggtaaaatgggactattgataaataaagcgcattaggagtgagtgaattgacggaacctttatttctaaaacctgtttttcaagaaaaaatttggggtggtcgcaaattagctgaagccttcgattatgatttaccagacggcgatattggtgaatgttgggccatttcagcccatccccatggtcctagtaccatcgaaaatggcccattaaaagggctcacattagatcaagcatgggcaacccaccgcgaatatttcggtaatgcagaaggtaaagtattcccattgttaactaagattttggatgctgaagcaagtctttctgtccaagtgcacccagatgacgcttatgctgctgctcatgaaggtccaaccgaactcggtaagacggaatgttggtatattttggatgctgaaccaggtgcttatttaatctatggccaccatgccaagaccaaagcggaattaacagcaatgattgaagcaggcaagtgggatgatttactccgcaaagtgcccgttaagactggtgactttttctacgtcccaagtggcacgattcacgcattgaacaaagggattatggcgcttgaaacccaacaaagtagtgatacaacatatcggttatacgattatgatcgggttgatgctaagacgggcgaaaaacgcgaactacacttgaagcaatcaattgatacgacgattgtgccgcatcaagatcccgttttgaatattcaaacagaacatgttggagattcaacaatcacgacttatgtgcaaccaccaatgtcaccatttttcagtgtttaccaatggttagtgaagggcgacttacactttgatcggacaacggcaccctatactttagtctccgtggtcgatggtgaaggcgaactgattaccgatgggcaaacttacccaattcacaagaatatgcattttgtgttaccatttgatattaagtcatgggacttaaaaggtgacatgcaaattattgcgtcagaaccgggtaacaagtaaactgaatataaccaattgcaaccgcagccgtggttgcaattttttttaatgattaaaagagtaggatgacaagtatgcaaagacaaatcgaagcaattgaacaatttgtacgaacggaattggcagcagaacacagcggtcatggattcgatcacattcaacgggtcgtgaataatgcccgtttaattcagcaaaaagagttagctgcggacctaacaacgattatcttggcggccttattgcatgatgtgattgatgaaaaaatcgcgactgatgttgaacaggctcgacaaaaggtaaaaactaaactaaccgaaaacggcatacaagatggccaacaaacggcaatttttgatattatcgaccacatgtccttttcgaaaaatctcaatcaacaccaaacgctaagtttagaagggcaaatcgttcaagatgcggatcggttagaggcaatcggcgcgattgggattgggcggaccttcatgtatggtggcgcacacgatggggttgcttatgatcctgagattcaaccacgggcggaattgacaaaggaaaactatcgcgaaccgtctaccgtgattaaccatttttatgagaaattatttaaattggcagcaacgatgaacacacaggcagcgcgcgaaatcgcgcaagcgcgaacggatttcatgcaccagtttgtggatcagtatttagcggagtggacagggcaacgctaaaaaacgaaacattgatatgcaaaagggcggtaacaatatttttgttagcgcccttttggatagttgtgttctgatcgtttaaacgtgttctgtaagtcatccgaacccagagccacacgctagccatcgaccgttagccagtcgttttggagtagttcgtgggttctcttttgcaggggtaaccacaattcagcgcggaggatattgatgagggatttccagaagaggcggtcctttttttgttggtcggtaatatgtaattcgatttcttgaccactttcagtggttgcgaaaactttatcatgattttcaatccgattaatttgaacggactcgactgctggcatttgatttaacataatgattcgctcctttttataggttaaagtcagtataccgagcaagtattgtgaaacgattatcattttatgaataaaaagtgtattttttcttgcgaaatgattaagacatcaaaaaagtcgaccgcataatggtcgactttttgatttgttaattttggacgcgtttgacgccggctgcatcgacttggtaacgtgattcttcgagtggtaagtcagcgatttgttgtaaatcaaattctggaaaacgccggctaaccgcaatcgataaaagtcgtttggctaaaacaccgttgtgcgtgagaattggaccatggaagtatgaaccaaatgtgtttttataaacacaaccttcggtgccgtcatcaccattgttgccgtgaccacgtttgatgtaaccaagtggtttttcatccttgcccaagaaagtccggccgttgtgattttcaaaaccgaggtaggtttcgttaaactcacggttttcgatgacaatatcaccgataaaacgattgttatcttggctcaatgtgtaatgatcaagtgcgccgattccaggaatcttgtcgccgtttgcgccaatatagtagtgacctaataattgataaccaccacagatggcaagcataacaccaccgttttcaatgtattcggtgagggctgcttttttgtcgttgaggtcttctgagatgattttttgttcgaagtcttggccaccgccgaagagaacgatatcgtaacgacttgcatcgaaatcttgaccgatactaatgacttctgtttcagtttgaatgccaacttttttggcatagtaatcaaggactaaaatattaccaagatcaccatatgtgttcattaaattgccgtatagatgacaaattcttaatgtctgggtcatactgatagtcctttcttaatataattggcagctgccagcttcttacgtagttgtaaaacagcggtataagttgctaatacataaacatgtttggttggggctgcttcaatggctgccatcgttgcatcgagttctttggtttcgtgtaattgatctgccgtgacaccggctacttttagccggaaagcgatatcgtcaccgcgttcgccaccggtaatcacggttggaatgttgtgtttgagtaagtcttcaaactcgccatcccaaatccaactcgtatcaattccatcggcatagttagcattaagcaacattgcgagtgaaaagtcttctggatcagaactgatcatttgtaagacttggtttaagccaaccggatttttaacgagtaccaatgtgaccgctttgtcttttaattgaatgacttcttgacggccaaagattcgtttgtcttcagtgaaggccttttgaattgctttcactggaatatcaaagaatcgaccgacactataggctgcaagtgcgttatagatgttgtacatgccgccaattgaaatttcaaacggttcgttgttaatttcaaagtgtgaatttgtggggtgcatctgattgatggcagtgactgcttcgtctaattcaggtcgttggtagccacaattagggcagtaaaacttcccttggctggcataactgatgaatttgtaatgaatgatgtgatcacaaacggggcacaaaacgccgtctgtgttgcttggagccatcatttcgccatctggtaagtggttgaatccgtaataaatctttggattaggaagttcaaccgatgaaaagagaggcaagtcagcgttcataatgagggttgcctcaggaacgagttcgacgcccgctagaatcatattataagtcgtgtagatttcgccgaaacgatccatctgatcacggaaaatattcgtcatcacaatcgctttgggcttgatgtagtgacaaaggggttccacattggcttcatcgacttcgaggacggccaattgccgttgtcctttttgaggatgatctgctaaaaaggcggtggtcaacccttgcatcatgttcgagccactcgaattggtcatgatatgatcgtatttttgcttcaacgtctgcacagtgagtgcggtcgttaatgttttaccattggtaccggtaatgataatcacgtcgtagttcttggttaactgctttaacacagcaggatcgaacttggttgcgattttcccggggagggagctgccacctttcataaaggtatgtaaataccaatatgaaaaacgtcctgctgtaattgcaaatgagcttttaattgtcatgcttgccaccctttcaatgttcataatcatagcataaattctcaatttggacgatataaaaacgcatctgcaaataaaataagggaaactttagaatttaatagtggcgaatattgttgcctcgctgattttcaggtatactagattaaaatgtgcttaacataggggtgtttgagagtggcgcaattattttttagatatggtgcaatgaatagtggtaagtcgattgaaattttaaaagtcgcacacaattatgaagagcagaataaatcagtgatcatcctgacgagtgggattgataatcgcgacggggtggggattgtttcaagtcggattgggctcaaacgtgaggcgacaccgattttctcggatacgaatatctttgagttggtacaatcgactaatccggatgcagcgtgtgtcttgattgatgaatcacaatttttagaacggcatcacgtaatcgaagcggcgcaggtcgttgatgatttgaatatcccggtgatggcgtttgggttgaagaatgattttaagaatgaattattcgaaggctcgaaatacttattgctatttgccaataagattgaagaaatgaagaccatctgttggttctgtcgcaaaaaagcgattatgaacttgcgaatgaacgatggcaaaccggtttatacgggtgaacagattcaaatcgggggcaacgaagcatactaccccgtttgtcggaaacactattttaacccaccggtaacacaagagagtgaaaaggaaggctagtcattcatggataaaatgtttgaacaacttgatagtttgttagaccgctatgcggaattacaggaattaatgtctgatccagaagtgatcaacgaaaccagtcggtatatggaattgtctaaagaagaagcgggtttacgggaaattgttggtaaatacacgcgtttgaagactgtcttaaacgacattgcagaaagcgaagaattgttacgcgaatctaatgacccagaaatggaagaattagctaaagcggatttaagtgagttacaagatgaaaaggaacaattagaacaagacatcaagattttgatgttaccaacggatcctaacgatgaaaagaatatcatcatggaaattcgtggggctgctggtggcgacgaagccagtctctttgcaggtgatttgttgaatatgtatcaacgctacgctgaatcacaaaactggcaaactgaaatcatcgatgaaacggctacagaagtgggtggcttcaaagaagttgcgatgatgattaccggtaaaaatgtttattcgaagttaaaatatgaaaatggtgcgcaccgtgtccaacggatcccaaagaccgaatcacaaggtcgtgttcatacctcaacagcgactgttgcagttatgcctgaatatgatggggttgacgtgcagctcgatcctaaggatattcggactgacgtttatcgtgcctcaggtgctggtggtcaacatatcaataaaacctcttcagccgtgcggatgacgcatattccaaccgggattgtggttgcgatgcaagatcaacggtcacaacaacaaaaccgagtgaaggcaatgcaaatcttacagtcacgggtttatgatttctatgaatcacaaaatcaaagtgaatacgattcaagccggaagtcagcggttgggtctggggatcgttctgaacggattagaacatataactatccacaaaaccgagtgacggatcatcgaattggtttaacgttaaacaaattagatcggattatgaacggggaattaggcgacgtcattgatgcgttaattctttacgatcaaaccgaaaaattggagcaattacaagatggcacagctcacttatcttaaagccctgaattgggcttttttatttttagaagaacacgctaaagaacgtgaagcagcgcgctttttactactcggtcgtaaacattggacgacgacccaactggtcttgcattatcacgatgaaatgccgactgccgaatacgatcagtatcaagcagacttaaacgcgtttatcgctgatcaaccggcacaatacattttgggatatgctaatttttacggacgcgattttaaggtgacgccggcaacgcttattccacgacttgagacggaagaattggtagaatggatattagatgctacacaaccaaagaaccgaccacttaaagtgttggatgttgggacaggaacgggcgccattgcaattacccttgcctgtgagcatccagaatgggaagtgaccgcaattgatatttcactagaagcgattgctgttgcacaagcaaatgcgcgccaattaaacgcgcatgttaactttatcgtgggtgattttctaaccccagtgatgggccaacagtttgatgtgattgtgtctaatccgccatatattgcacaagatgaacggcatgtgatggatgcgtccgttttgaaatacgaacccgacttggccctatttgcagataataacggcttagcgttttatgaacggtttgctaaagaagtgcgtgcgtatttaaaaccagatgggcagctttatttagagttcggttatcagcaaaaagaggcgatcgttcggttgttcgaacatgaatcgaccgatgtagcggttacaatcaaaaaagatatggctaattggtctagaatggcccgtgtgggttacgatttcaatcggaatttggtatgatgtaaatcagaagtagagtaaggaaggcctataatggaaaccaagagatacacagtagaacagattgaacaagcagcagcagatttaaaagcgggcgaattgatttcatttccaactgagaccgtctatggtcttggggcagatgcgacgaatcctgaagcggttaagaaagtttatgccgctaaggggcgcccaagtgataatccgctaatcgtgcatgtagcaagtgttgcgacggttgagcattacgcagccggagttagtgatcgatttaagcaattagtcgacgctttttggcccggttcattgacaattattttgccgctaaaacatgcggcactagattcagttgtgacgggtggtttaaagaccgctgcctttagaatgccgaacaatgcggtgacgttagacttgattaaagcggccggtgtcccacttgtggggccttcagccaatacatcaggcaagcccagtccaaccactgccgatcacgttttacatgatctaaatggaaagattgccggtgtcattgatgatggtccaactggtgttgggttggaatcaacggtgattgatttaagtgttgcgacacccgttattttacgacccggtgttgtgactcaagaagccattgaacgtgtgattgggccgattatgacaaaccaccataaagttggcgcagctgaaacgccaaaggcaccaggcatgaaatacaaacactatgctccaaatgcacaggtttacatagtgccaacgccagatgaatttccggcggcggttaaatgggccagtcaacaaaatgtgccatttggtgttatggcggttgatacggtgttagggcagttatctgacgttaggtttaaagatcagttctctttaggtgattctgtagtgactgctagtcaacacttgtttgaaggattacggtattttgatttgaatcctgaggttaaaattatattagtgcaaggcttcgcaaaagagggtgtcggattagcgtatatgaatcgcctcgagaagtctgccggccaacaatactttacttcgaaataggcactattttaataggaagaggagtgattgtaaatgattgaacaaactgatccagcaatttacgaattgattaaaaaagaggaacaacgccaggtgcataatattgaactaattgcttctgaaaacattgtttccggagctgttcaagaagcacaaggtagcgtattaaccaataaatatgccgagggttatccgggcaaacggttttacggtggttgtgaatttatcgatcaaattgaatcactcgcgattgaacgtgctaaacaactttttaatgcagaacatgccaatgtacaaccgcactccggttcgcaggctaatatggcagtttaccaagcgcttttagaacccggtgataagattttagggatgaacctcacagatggcggtcatttgacccatgggtcaccgtttaacttcagtgggcaactttatcacttctatagttatggcgttgctgacgataacgaacgaatcgattatgatgcgctcgctgctaaagcggatgaaattcatcctaaaatgattgttgcaggggcatcagcatacagtcggacaattgacttcccaaggttacgcgccattgccgatcatgtcggtgcctatttaatggtcgatatggcacacattgctggtttagtggcaactggtgttcatccaagtccagtaccatatgccgatgtggtgaccacaacaacgcataaaacgttgcgtggacctcgtggtggaatgattttgtgtaaagcagaatatgccaaagcaattgactctgccatcttccctggtattcaaggtggaccgctcgaacatgtcattgcggcgaaagctgttgcatttggtgaagatttacaacctgaatttacagcatatacaaaacaaattgtggccaatgcgcaagcgatggctgccgtttttgaacaatctgacttagtacgtgtggtttcaggcgggactgacaatcatttaatgttactcgatttaacgcagagtggcttaaatgggaaggaagtccaagcatttttagatagtgtccacattaccgttaataagaataccattccttttgaaaaattaagtccatttaaggcaagtgggattcgaattgggaccccagcaatcacatcgcgcgggtttaaagaagcggattgtgaattgattgcgcaattaattttagaagtgattgaaaaacacgatcaattagacgccatgacgcgcattagtgcagatgttttagcgttgacggatcgttttccaatcacacaagctaaatttttagattaattaatgaataccgctagttttttgatgctatttacgctacaatagtaaacagaattttacgcggaagggagagtgactcggagaaggttttctttggagtcactctttttttgcgaaaaaaatttggactaaattcattgaatagaataggggcaaagtaaatggcaaaattcacagtattaaatcatccgttaattcaacacaaattaacgattatccggaataaggatacgggtactaaagttttccgcgaagtcgcaaacgaaatcgcagaattaatggtttatgaaatcacgcgcgatttagcaatggaagacgtagcagttgaaacaccaatggggcctgcaattgaaaaacaattgagcgggaaaaaattagccgttgtgccaattctgcgtgcaggtcttgggatggttgatggcgttttagaattaatcccagccgctaaagttggtcacattggtatgtaccgtgacgaaaaaacattacaaccccacgaatactttgttaaattaccaacagatatcgatcaacgacaactattcatcgttgatccaatgcttgcaactggtggctcagcaatcatggccatcgatgcccttaaaaaacgcggcgcaacgtcaatgcgccttgttgtactagtggctgcacctgaaggcgttaaagctgttcaagaagcccatccagatgttgacatctatgcagctggtcttgatgatcatttaaacgaggatggatacattgttcctggtttaggggatgcgggcgaccgtcttttcgggactaaatagccattaattaggtaccgataataaaagcgcgcaacacttgattttcctgtgttacgcgttttttttgccaaaaaagcaaccgttaataagtttaatcttttgatatgataatatttatggtatttgagtgcattgacaaaaaaataattagaaattagttagtatttgctttgtacttttaatttaatggtggtattatcatacttgtattgcggtgatgatttatgcttaatttttctacataaatattgctgtttttaggttcgttgtgcaactcgcgtagtcgttgatagagtggaatcaacaaataagcctaagggaggagggaattttgtggatgataaatatcccattattagcattttgggaattcgttttaatttagcaaactgtctatcggtcttagtaagtgcagttttggtttttgcactcgttttctttttatcaagaaaaattgcgcttaaaccgactaaacggcagaatattttggagtggatcattgattttacgaacggaatcgttaaaagtgcgatgcccggtgaagaaggtaaacaattttacttatttgcattcgtcatgttcatgttcgtatttatcagtaatcaacttggtttgattcttcaaattaaggtacatgatgtaacttggttgaagagtccaacggccaatccgattatcactatgtcgcttgcaatgatcgtcttagtgattgcgcactactttagtgttgaacggttagggtttggtaattacatgaagagttatattaaaccggtaggatttttcttaccaattaatatcatcgaacaatttaccaatttcttaacgttgtccttgcgtttgtacgggaacatttttgcaggtgaagttttactaagtttattagttaaaatggccttctcacatggaccagcaacgatgcttgtgacggcaccgatccaaatggtttggcaaggattctccgtctttatcggggcaatccaagcatatgtatttgtaacattatcgatagtctatatttcagaaaaagttgaaatggaagactaaaaattaggaggaaaaaacatgaactatttagcagcagctatcgcagctggtttagcagcattcgcagcatcatatggtaacggtaaggttatctcaaaaacaatcgaaagtatggcacgccaaccagaattatcagcagaattacgctcaacaatgtttatcggtgttgggttgattgaagctgttccaattctttctatcgtcgtttctttcttgatcttatttagttaatccgagtgaatctaaattttcgctttaaaaattagtcagtaagtcaaggaaggagtgtcaatagatgtttagtaatttaatcgttggtgcttctgaagcctaccttggagattcacttttcgtattagttgtctttatcattttagtcgctttagttggtaaatttgcgttcggacctgtttcaaaaatgatgcaagctcgttctgacaaaattacaaacgacttagataacgccgctcaatcacgtgaagatgctgccaaattagcagcacaacgcgcaacagagttgaagaattctaagtcagaagcagttgaaattgtgaatacagccaagcgaaatggtgaaaaacaacgcgaaggcatggtcacacttgctcaagaagaagtccaaactttaaaacaaaatgctaaaaaagacatcgaacaatctcgtttagatgcgttaaacagtgtgagagatgatgttgctcaactatctattgaaattgcttctaaactcattaagaaagaattgtcagttactgatcaaaagtcattgatcaattcctatattgaagggttggacaagcaaaatgaaactagataaatatgcagtcggacaacgctatgcaaaggcattattttcccttgcagaacaagagcaacaatttgaaagtatccatgaagagatacaagcactcgagactattttcaatgacaacccaagattgggtgcagttctgactgatacgactttatctggattgaaacaacgtgagcttctaaagagcctttccggtgaatttagtacactcatgcaacactttttaagccttgtttttgactatcaaagaatggctgagatgccatacattattgcggcctacgaagatctttatgatcaaaagatggggattgcacacgctaaggtaacgtcagccgttgctttagatggtgatcaaatcgtaaagattagccaaagctacgctaaacgcgaaggtctcaatcaggtcttagtggaaagtatcgttgatccagatattattggtgggattgtactggaatcgaatcacaaggtgatcgatggcagtgttaaacatggcttagatcaaattaagtcattactattgaaatagtcaatcgttgataaagaggtgaacctgatgagcatcaaaactgaggaaatcagtgcattaattaaacaacaacttgcaaattataatgaagatttagccgttgaagaagtcggtactgtcacttatgttggtgatgggattgcacgtgctcacggtttagaaaacgccctttcaagtgaattgctagaattttctaacggttcatacggggttgcgcaaaacttggaaaccaacgatgttgggattatcatcttaggtgaatatgaaaacattcgtgaaggtgaccaagttaaacgaacaggccggattatggaagtgcctgttggcgatgctttaattggtcgtgttgttaatccattgggtcaacccgtggacggcaaaggcgaaattaaaacggacaaaactcgtccaatcgaaaagaaggcccctggcgttatggcacgtcaatctgtttcagaacctttacaaacaggtttgaaagccattgatgctttggtcccaattggtcgtggtcaacgtgaattaattatcggggatcgtaagactggtaaaacatctgtggcgattgatacgattattaatcaaaaagatcaagacatgatttgtatttacgttgcgatcggtcaaaaagaatcgaccgttagagcgcaagtggaaaccttacgtcgttacggcgctatggattataccatcgttgtcgaagctggtcctagtcaaccagcaccattactctacattgcaccatatgctggtgcagcgatgggtgaggaattcatgtataacggcaagcacgtcttaatcgtctatgatgatttaagtaaacaagctgctgcttatcgtgaaatttcattacttttgagaagacctccaggccgtgaagcttaccctggtgatatcttctacttacattcacgtttattggaacgggctgctaagttaagtgatgaattaggtggcggttcaatgactgctttaccaatcatcgaaacacaagctggggacatctcagcttatatcccaactaacgttatttccatcactgatggtcagatcttcttggaaagtgatttattctattcaggaacacgtccagcgattgatgctgggtcatctgtttctcgtgttgggggcgcagcgcaaacgaaggcgatgaagaaggtttctgggacattacgtcttgatctttcatcataccgtgaacttgaagcctttacgcaattcggttcagacttggatgcggcaacacaagcgaaattaaatcgtggtaaacggactgttgaagttttgaaacaaccacttcacaaaccattaccattcgaacaacaaacaacgattctttatgcattaacacacggctttattgatgacgttccagttgacgatatcatgcaatatgaaagtcaattgagcgattatcttgaaagtaacgcaaaggacttgatggacactatccgtcaaaccgctgcattgccagatacagataagttagatgctgctatcaaatccttcacagaaggttttgtcggcgctgaagctactgctgacaatcaagactcaggacagtaaggggtgaattaattggctgaatctttaatggatatcaaacgaagaatcgcctctactaaaaaaactgggcaaattacgagtgctatgcaaatggtctctggtgcaaaactttctcagattgaaaaaaattcaatcgcttatcaacaatatacgaataagattcgagaaatcgtcacgcatttggctgcaagtcaattaattgcaagtgcacgtcaaaaaagtaccgctaaagcagcagaagctactaacggtacttcacagaaatcattgcggcatgacattacgttaagtaatttgttagtggaaagaccaatcaaaaagaccggttatttggtcatcacgagtgatcgtggattggttggcgcttataacagctcaatcttaaaagcaatggttgaaatgatttcagaaaaccacaagtctgccgatgaatatgctattttagccgttggtggcactggtgctgatttctttaaagcacggcaaatgaacttatcctacgaatatcgtggtgtaagtgatgtgccatcatttaatgaagtccgtgaaatcatcaaaacagctgttgcaatgtatgatagcggcgtgtttgacgagttgtacgtttgttacaaccaccatgtcaactcactgacatctgcttttcgagctgaaaaaatgctacctattaccgacttggatgtttcagaagtcactgataaagatcaagaatacatcacagaaccttctgttgatgatgccttagatgccattctaccgcaatacgctgaaagtttgatttacggcgcactacttgattctaaaacagctgaacattctgcttccatgacggcgatgaagagtgccactgataatgctaataatttaatttctgatttatcaattaaatttaaccgggcacgtcaagcacagattactacagaaatcaccgaaattgtcggtggtgcggcagcattagaataagaaacgcgggaggaaaataacaactatgagtatgggaaaagttgtccaagttattggtcccgttgtcgatgtcgaattttctttagatacgactttaccagatatcaataatgccttggttgtcaacaaagggaacgacgaatctgtcgtcttagaagtggcacttgaattaggtgatggggtaatgcgtactatttcaatggaatcaactgacggtttacgtcgggggatggctgttgaagacactggtcgtgcaattaacgtaccagttggtaaagaaactttaggacgggtatttaacgttcttggtgaaacaatcgatggcggcgaagaatttcctgcagattttagacgggacagtatccaccgttctgcacctaaatttgaggaattaaatacaagttcagaaattcttgaaacagggattaaggttatcgatttacttgccccttatttacgaggtgggaaaattggtttgtttggtggtgccggtgttggtaaaaccgttttaatccaagaattaatccataatatcgctgaagaacatggtggtatttctgtctttactggtgttggtgaacgaacacgtgaaggtaatgacttatactttgaaatgaaagaatcaggcgttttggaaaagacagcgatggttttcggtcaaatgaatgaatcacctggcgctcgtatgcgagttgccttgactggtttaacaattgctgaatactttcgtgatgttgaaggccaagatgtgttattgttcatcgataacattttccgattcactcaagctggttcagaagtttctgccttattaggacggatgccttctgccgttggttaccaaccaacattggcaacagaaatgggccaattgcaagaacgaatcacgtctactaaaaaaggttcagttacatcaatccaagccatttatgtgcctgctgatgattatactgatcctgcgcctgcaacaactttcgcgcatttggatgctacaactaacttggatcgtaaattaacacaacaggggatttatcctgctgttaacccactagaatcaacttctagtgctttggatccagaaattgttggcgaagaacattacgaagttgcttcagaagtgcaacacgtcttacaacggtatcgtgaattacaagatatcatctcgatcttagggatggatgaattatctgatgatgaaaagattatcgttgcgcgtgctcgtcggattcaattcttcttatcacaaaacttccacgttgccgaagccttcacaggccaagccggctcatacgtgccagtaaaagatacagtggcaggcttcaaaggcatcttagcgggtgactatgatgatgtccctgaagaagcattccggcttgtcgggaatattgatgctgcattagcaaaagctaaagaattgggttatacaccatccgaacaagaaacgaaacaagcttagaaaggggcgttaatgatggcagaagaacaaaaggtattaaccgttaatatcgtgaccccaagtgggattgtctatgatcaccacgcaacattgttggttgtaccagcgatggccgggcaacttggtattatggctaatcatgagccaattattacccctttagaaattggtgagattcgcgttaaacggactgatgatccagcacgtgaagacgcaattgcggtcaatggtgggttcatggaagtgagccataacgttgcttcaatcgttgccgatagtgctgaacgggcgcgtgatattgatattaggcgtgcgcaaagtgccaaggaacgtgctcaaaacgcaattaaaacagcgtccgaacataatgatactgacgaattacgccgggctcaaattgcactgcaacgtgcgataaaccggattaacgttaagaatcacttattgtaggattcaaaaagccttaaacctgaatggtttaaggctttttttgtttcttaagattcagtctggtgggcagacaaatcctatttcggtatgttacaatgtttgcatatcacaaaaggggcgttatttaagtgcaatcaatcgggttacaggcagttatttcaattattagccatattggttttattttaatcagtttttatggcttacaatcaatccggtttgagcaatttttcaaaccgaatcatatccgtcaagtacagattgtcatagtatttctcgctattgtgatgggctacaccgttagccaattctttttagaaataatcgcgcaggctaaaaatgtgatttttttagtcccataaactagcagtcttattcggagggaaactcttggaaaaattgattatacaaggcggtcaacgattagttggcgaagttcaaatcgaaggcgccaaaaacgcagtattaccaattatggcggctgccttactagcaaccgacggacccgttcaattaacgaacgttcctattttatctgatgtcttcatgatgcaagatgtattaaagagtttagatgctaaagttgagtttgatgaacaacggaaccaattaacaatcgatgccagtggtgatttgaattttgaagcagcttttgaatatgtttcaaaaatgcgtgcttccatcgttgtgatggggccgttattagcgcgcttaggtcacgcacgagttgcgatgccaggtggttgtgctatcggttcgcggcctgttgatttacatttgaagggttttgaagcacttggtgcaaccattcatcaaaatcatggttacattgaagctaaagcagaacgcctagtgggaactaatatttacttagattttcctagtgttggtgcgacacaaaacatcgtgatggctgcgacaatggctgaagggacaacggtgattgaaaacgttgctcgtgaacctgaaattgtggatcttgctaatgtcttaaacaagatgggtgcgaacgtttttggcgccggaactgagacaattcgggtggaaggcgtaaccgctttacacgggacggatcacagtatcgtgcaagatcggattgaagccggaaccttcatggtagccgctgcggcaacacaaggaaatgtcttgattaaagaagcgattgctgaacacaataaaccactcctatcaaaattagtggaaatgggtgcggaagtgattgacgaagaagctggtgttcgaattattggtcccgctgaattaaaggcatgtaatatcaagacgctaccttatccaggctttccaactgatatgcaagcacaaatgacgacacttcaattacttgctaagaagacgagtgttatgaccgaaacggtatttgaaaatcgtttcatgcatttggaagaactccgccgaatgaatgcggattatcaaattgaaggtcaatcagttgtgctttatggcgatacacatttcaatggggctgaagtggctgcaaccgatttaagagctgccgcagcacttgtcattgctgggttagtagctaatggtgaaacgttggttacgaaccttcaatacatggaccggggttactatcatttccatcaaaaattacgggcacttggggcacatattagtcgagctgattttgatgctgccggtcaccggattaaacaagcaaaacgtgcataaaacagactggcggcgcctgctatttcagcggacgtcgcttttttattttgccaaatcaggatactaaaggtacctgtcttatggtataatgatttactgaatatagttctcggaaggagcaacaccaaatggctaaagatatcgggattgacttgggaactgccaacgtcttaattaacgttaagggaaaaggcattgtcttaaacgaaccttcagttgttgcgattgatacccaaaccaaaaaagttttagcagttggctcagaagcgtatcggatggttggccggacacctggcaatatccacgctgtccgtccattaaaggatggggtcatcgctgatttcgacattacagaagaaatgttagcgtattttattaataaattaaatgtaaagggcttcctatcaaaacctaatattttgatttgctgcccaacaaatattacatcaattgaacaaaaagcaattgttgaagctgctgaaaaatcaggtggcggcaaagtcttcttggaattagaaccaaaagtcgcggctgtaggtgctggcatggatatttttcaaccacgcggtaacatggttattgatatcggtggtgggaccagtgacgtcgctgtgctttcaatgggtgaagtggtcacaagtcgttcattgcgtcttgcaggcgataagatgaatagtgaaattgccgcatacgttaagaagaaacataatctattaatcggcgaacatacggctgaaacaattaagttaacaattggtaacgtttggcatgctgatgcgagtgagtcacttgagattcgtggccgggacatggtaagtgggttgccacaatctgtctcaattagtgcagatgaagttgaatcagccttgcatgaaacaatgatggaaattattgcggctgccaaagaagtgttagaagtgacaccaccagaattatctgcagatattattgatcggggaatcatgttaacgggtggcggtgctttattacgcaatatcgctagcttattctcagaacatttgaaggttccggtggtcttagcagaaaatccattggatgctgttgctttagggactggcatcttattagataatattgaacataaacgcgcttattaagccgcattctattaaagaaggattgtgattgtgtgtatcaatcaaattttgacgaacacgtcaaacccgttttaaagaaaattttattggttttcgtgctcataattattgcgttattagttggtcagatgattggttttgcaattggcggccagaatccatttgccgttttcttgcctagtacatggagtcatattattaatttcttgcagtagcatgcgctaaagtgaggcagataaattgcggaaaatattgattggattggtccgtttctatcagaagggaatttcaccattattaccaccgagttgccgatattacccaacatgttcgagttacatgattcaagcaatccaaaaacatggtgctattttgggtttaatcatgggcatcggtcgtatattgcgttgtcacccgtttgtacggggcggctatgatccagtaccagatcatttcaccgttttgcgtaatcgacagcaagacgagtcacaaaagtaagtcaaagaagttaggggttcaacataactatgtcaaaaaaagaacaaaaaattactgtcacaattgatgacatcaaacgtaatggccaagaaatgacaagcgtcatggtcggcaaaaatgaaattggcgtgattgtagaagatagcgctaagaaacgttttgaagcaactgttgaagggactggtcaaagtatcattactaagacccacgacgatgcagttaacgaattactacgggagtaccacttacaccaaggttaattcttaagaattaattagaattacagtaacccggcagaattctggccgggttatttatataatgagagcagaattgattgaaggagacttagcatgccaaaggaagtagaaacaacagaagattcctcgcgagttgattatggaatcgtcttttcagtctttatgctagcgttgattggcttgatgtcaatctatgtggcaacatcacatgatacatcaggtgcgagttcaactcgagccgttattatgcaagctgcatggtacgtgattggtggaattgcgattgtcgcaattatgcagtttgattcagaacaactatggcggattgcaccactggcttatgggttagggattttcctcttgattgccgttttaatcttttataatcgggcagtcgccttgcaaactggggcaaagagttggttctctcttggaccaatctcatttcaaccatctgaagtcatgaaaccggcatatattttgatgttgggcagggtcgttactcaacacaatacggcttatccagaacacacgattaagacggattggatgttacttggacgaatgttactatggacacttccagtgatggtcctattgaaattacaaaatgactttgggaccttattagtgttcgttgccatcttaggtgggattgtgcttgtctcaggtgtgacctggaagattttagccccagccattgctgtcttagtcgctgttgggggcacggcccttacactagcggcgacgacccctggccgggtaatcttgacgcatctgggctttaaaacgtaccaattcaatcgaattgatgcttggctgcatccttttgataatactgccagtaccagtttacaattatcgcagagtttaaaagcgattgggtctggtcagctatttgggaaaggcttcaatcaagtgcaagtccatgtgccagtacgtgaatccgatatgattttctctgtcattggtgagaacttcggctttgtcggttcatgttttgtgattcttttgtacttcttgttgatttaccaaatgattcgggtcacatttgatacgaagaatgaattttacgcgtatgtctcaactggggtcatcatgatgatcttattccatgttttcgaaaacattgggatgagcgttggtttattaccattgacagggattccattgccgttcatctcacaagggggctcgtcattattggggaacctaattggcgttgggtttatcatgtcgatgcggtaccattataagagttacatgttcagtgaagctgaagatactttctaggagtgaatgacggatgacgatgaataataatgattatttttggacagaggaaattgcagcatcgattagaagaattgggatcaccaaagccgcacaaaatgagtttgggttaatcaagtttgttgatgttccaatcgtggggcaaaaattgacggctaatgaaaccttagtggccattgaagctgagaagatggtacaagatcttgacagtccactagctggtgaattagtaaacgtcaacacaccgttagctgataatccggaattattaaatgcagataacgaaaaagatgcgtggattgctgacattcgggtcgattaggccattacttaaacaataatctgatttttttgaatagtcttgcttgacttttaattgaactttaattatgataggtactacttaatacaagcgatgaaaagatgagtaatttagtcagtagcattttaagagagtccggtcaggtgcaagcggataatgtgaaagctagatgaatatggtctttgagcaattcatttggtaaggtttaactgagccgaatgcgggggttgcccgatatagcgaacgagtatcaatcgggtactttgtaaggcgattactgtgaggtaatcgtaaattaaggtggtaacacgcatttagcgtcctttctctcatttatttgagaggaaggatttttttttggcattttttaaaagaagagggagcgattagtatgttgacattaaaacaagtgggtaaaacctttgagcgagaacaaaaaacattcgccgcactaacggatgtctcgttgaacattgaagcgggcgaaatctacgggattatcggttattccggcgctggtaagagtacgttgatccgactcttgaatggacttgaaaagccaacgactggggatgtgctcgttgagggccagtcaattgtggggttgagcgaacaagcaatgcggccgattcggcagaaaattggcatgattttccaacactttaacttactctggtcaaagacggtgttagaaaacatcatgttgccactaaaattagccggggtacctaaggcagaacgacaaatcaaagcccgcgcattattaaagattgttgaattgacccatttagaagcggcctatccaagcgaactatcgggcggtcagaaacaacgggtcgcaattgcacgagccttgattagtgacccgaagattctgttatgtgatgaagcgactagcgcccttgatccgaaaacaacgaattcaatcttaacgttactggctaagattaatcgtgaaatggggattacaatcgttcttgtcacccatgaaatggatgcggtgcggcggatttgccaacgaattgcggtcatggaaaatgggcggttaatcgaagaagggactgtgcacgaaatctttgaaaaaccacaaatggctgcaaccaaggcatttgttgctgaatccttagtggtatcaccgagtgaaacggccgcttcgattgatcaactgttagaacgggttccaaatggtacaatcgtccaactgcgatttaacgaagaacaatcgagtcaaccggtgatcggtcgcttgatgcgtcaatacccagcagtcgaaatcagtgtcatcagtgggagtttacaacaaaccattaatggcgcacttggctatttatacattcaaattcaagctaatccaagtgatttaaaggcagtccttgcagaattagcacaacaaacaatcgaagttgaggtggtacgtcatggataacgtaaacggatttcaatcctattttcaatttaagcaagtgaactggccaagtatgtggcaagcaacttttgaaacagtttggttaacaattgtcagtgttttattggtggcagttcttggattcgcactcgggttagttctttatcaaacaaacgcgagtggtggtcgagtgaatcggctgttgaatggcattgtggctttattagtgaacgtctttcgttccattccattcatcattttaatcgtcttgttgattccattgacaaaaggcttgatgggcacgatgattggcccgaaagctgcgattccagcgttaatcatctcagccgcgcccttttatgcacgactcgttgaattagcttttcgggaagtcgatggcggtgtgcttgaagccacccgttcaatgggcgcttcaaaagtccaaatcgtctggcaagtccttttaccagaaagcatgccggcgcttgtttccggcttaactgtcaccgcaatttcacttgttggttataccgcaatggcgggggtgattggtgccggtgggctgggaaatcttgcttaccaagatgggttccaagctaaccaaaatgcgattacgttagtcgcaaccgtcattattttaatcatcgtcttcatttgtcaaaaaacgggcgacttggttgttcaacacattgatcatcgttaatttaaaaggaggagttttcatgaaaaaacacagtttaggattattagcagcagtcttcttattagcgggcgcacttgccgcttgtggtaacaaagaagcgaagtcagacagcaacacaatcgtcgttggggcatccgcaattccacacgccgcgattttgaaacacgttcaaccggagttgaaaaaagaaggcatcaacctcaaagtaaaagtctttagcgattatgttttacccaataaagctttagcgagtggcgaattagatgcgaactactaccaacacaaaccctttttgaagaaggccaataaagataacggctacgacttagtcagtgttggcagtattcacttagaaccgctcggcttatacagtaaacaagttaaaaaattgagtgatgtgaaatcaggtgcgaaagtattagtttcaagcagccagccagactggggccgtgttttaacaattttaaaagacggtggcttaatcaccttgaaatcgggcgtaaatgctgaaaacgcaacgtttaaagacatcgctagcaatcccaaacacctcaagtttgagtacacattcgaaccaaaactcatgcctgaacttttgaagaatgatgaaggcaccttagtggcgattaactcgaactatgctgtgcaagccggtctcaaccctgaaaaggatgctgtggctcttgaaaagcaatcttcgccatttgccaacattgttgtgacaaataaaaaagaccgcaataacccagctatcaagaagctcgttaaagcgctcaaatcaaaatcaacgcaagaatggattaagaataaatggcacggcgcagtgttaccagttgaataatgatcaaagacaagtcattaagacttgtctttttttgctgttagcatgtgtaattcttaatttaattggaaaaagcgggttaaattggatatactatcattgaatataaacttttagggggagtaagaatgagtcgtccgtataatattggtttagatattggtactagttcaattgggtggtcagtggttgatgaccaaagtaagttggtcagtgtaagaggtaaatatggttatggggttcgtttatacgatgaaggacaaacagccgcagaacggcgcagctttagaacaacacgtcgccgattaaaacgacgtaaatggcggttaggattgttaagagaaatctttgaaccctatatcacgccagttgatgatacttttttcttgcggcaaaaacaatcaaacctaagtccgaaggatcagcgaaagttatatccacagacaagtttatttaatgatcgaacagatcgggcattctatgacgattatccaacgatttaccatttaagatataagctaatgaccgagaaacgtcaatttgatattcgcgagatttatttagcgatgcatcatattgtgaagtatcgcgggcactttttaaatgaagcgcccgtctcatcctttaagagtagcgaaattaatttagtggctcattttgacagactaaacacgatttttgctgacttgttcagtgaatctggctttcaactagagacggataaattagcggaggtcaaagcgctcttattggataatcaacaaagtgctagcaatcggcaaagacaagcattatcactgatttatacgccaagtacgaataaggcagttgaaaagcagaataaggcgattgcgacagaattattaaaagcaatcttggggttaaaagcgaagtttaatgtgcttactgggatcgaagccgaagatgttaaagcatggacactcacttttaatgcagaaaactttgatgaagaaatggtcaagttagagagtagtcttgatgataatgcccatcaaattatcgaaagcctacaggaactttattctggtgttctattggcgggaatcgttcctgaaaatcaatcattgtcgcaagcgatgatcacgaagtatgacgatcatcaaaagcatttaaaaatgctaaaagcggtacgggaagcgttagcacctgaagaccgacagagattaaagcaggcttatgaccaatatgttgatggtcaagaaaatacgaaggcctattcgaaggaagatttttatggagatatcacaaaagccttaaagaacaacccagatcatccgattgtgagtgaaattaaaaaattaattgaacttgatcaatttatgccaaaacaacggaccaaagataatggggcaatcccgcatcaactacatcaacaggaattagaccggattatcgagaaccaacaacaatattacccctggttagcggaacttaatcccaattctaaacggcaaacagtcgctaaatataaattggacgaattagtggcctttagagtaccatactatgtggggcccctgattacggctgagcagcaacgacaaagctccgatgcgaaatttgcgtggctgattcgtaaatcagaaggccggattacaccgtggaacttcgatgataaagtggaccgtcaagcatccgctaatgaattcattaagcgcatgacaacgactgatacttatttattggctgaagatgtactccctaaacagagcttaatttatcaacggtttgaagtgttgaatgaattaaacggacttaagattgatgaccaaccgattacgacggagttgaaacaagcaatatttacggatttatttatgcaaaaaacaagtgtatcagtgaaaaatattcaggattacttggtatcagaaaagcgctatgcaagtcgtcccgcaattactggtctatctgatgagaataaattcaatagtcgattaagcacgtatcatgacttaaaggcgattgttggggatgcggttgaagatgttgataaacaagtcgatttggaaaaatgtgttgaatggtcaacgatttttgaagacggcaaaatatatagcgccaaattgaatgaaatcgattggttaacagatcagcaacgtgtgcaattagctgctaaacgctaccgcggttggggtcgtttgtcggctaaattattaacgcaaatcgtcaatgcgaatggacaacgaatcatggacttactctgggatacaacggataacttcatgcggattgtgcactctgaagactttgataaattaattactgaagctaatcaaatgatgctagctgaaaatgatgtacaagatgttatcaatgatttatatacgtcaccacagaataaaaaagcgctccgccagattctgcttgttgtcaatgacattcaaaaggccatgaaaggccaagcgccagaacggatattgattgaatttgcgcgcgaagatgaagtgaatccacgactttcggtgcaacgtaagcgccaagttgaacaagtctatcaaaatattagcaatgaattgctaaataatactgaaatcagaaatgaacttaaggatttatcgaattctgcattgagcaatacgcgcttattcttgtacttcatgcagggtggtcgggatatgtatacgggtgattcgttaaatattgatcgtttatcgacgtacgatattgatcatattttgccacagtcgtttattaaggataactcactagataatcgggtattagtttctcaaaaaatgaatcgtagtaaagcagatcaagtaccgaccgactttacaagtgtcgaacttggacaaaagatgcagattcaatgggaacaaatgttgcgtgctgggttaattaccaagaaaaaatatgataatttaacgttaaatccggatcatatcagtaaatacgcaatgaagggttttattaaccggcaattagtagaaacacgccaagtcattaagttagcgacaaatctattgatggaacaatatggtgaagataatattgagttaattacggttaagagtgggttaacccaccaaatgcgaacagaatttgattttccgaaaaatcgtaatctaaataaccatcatcatgcattcgatgcttatctgaccgcattcgttggtctgtatctattgaagcgctatcctaaattaaaaccttattttgtatacggtgagtatcagaaggcaagtcagcaagataagtggcgtaactttaattttctaaatggtctaaagaaagacgaattggttgatgaaaatactgaagcggttatttgggataaagaatccggtctagcttatttgaataaaatatatcagtttaagaagattctagtgacccgcggagtgcatgaaaattcgggagcgctatttaatcaaacgctctatgcggctaaagatgataaagcaagtggtcagggcgggaagcaattgattccagctaagcaagatcgatcaactgcgctctatggtggttactcaggtaagacagttgcctacatgtgtattgtacgcattaaaaataaaaagggtgatctctataaagtctgtggtgttgagacgagttggttagcgcaacttaaacaactgacggatgaagattcacaaaaggcattcttagagcaaaaaattagtccgcaatttacaaaagtgaagaaacaaaaaggtaatatcattgaggccgtagaagaattcgaagtcattgcaccacatatcctaatcaatcaacgtttcttcgataatggtcaagaattgacattgggctctgcgacgtataaacacaatgagcaggaattgattcttgataaaacggctgttaagttattaaatggcgcgctacctttaacacagtctgaagaacttgctgaacaagtttatgatgaaatcttagatcaagtgatgcactatttcccactgtatgatactaatcaattcagagctaaattatctacgggtaaagcagcctttatgaagttaccatggaagagtcaatgggatggtaataagatgacacagattggtcaacagatcatattagatagaatcttgattgggttacatgcaaatgcggcagttatcgacttaggggtgttgaaaataagtacgccactaggtcaaatgcagcaaccatcagggatttctctttcacctgatacccaaattatctatcaatctccaaccggtttattcgaacgacgagtagctttaagggatttataaataaataaagctagcctgtcattagtgtaatgatgggctagctttttggtttgaaggcataaaaaaaggcctcataagaggctcagaatagaaaacttggtccgaagaccttgtttgattttaactcagagtatcaaatcaatgagtatttcgattgagtgtatcaagctcaacaacagcattatagcatgttatcattttgaaaacaaggatgtagggggtaaatttttatgagttggcgaacagttgtgatttcacaacatgcaaaggtttcttattctggacggaagattgttgtccagacaaaagatgcaacacaccaagtaccaattgatgatatccaaattttgttagttgcgactacccaggccgttttaacggcatcggcaattactgagttgagtgaagctggcgctaagattatttttacaggcaaagacggtaatccaacttgcgagacaattgcggattatccaggaaatcgtagtctcgcgtcgattcaacaacaggttgaatggggaacggggttgaaagaaaccttatggacggcgattattcaagccaaaatagcgatgcaaattcaatgtgcacaattgttaggaaaggatattgaagacttaacaacagaagctgatgcaatggtatttgctgatcgaacaaatcgagaagccgtgattgcgcgcaagtattttcagttagtttttgataaagactttgttcgaacggagtacagtcccattaatgcagcccttaattatggttatagtttgttgttatcagccgttaatcgcgaaattgtttgtaatggctatttaacacagtttggcattcatcatcacaatggcgtcagtgattttaatttgggttccgatctaatggaaccttttcgaccagtgattgattattgggtggcacatcaaaagtttaatgaattaacccctgatgttaaatttggtttagtggagttactgaatcttgagctagaatataatggacagatcacaattcttagaaacgcactcactaaacacgtacagaattgtttgaaattcatgacaactccgaaagaagagtttgaagtaaaggtggtaatgactcacgaggtaccgaataatgcgcttattagtcatgtttgatttaccagttgaaacgagcgaggatcgcaaggcataccgtcattttagaaaagcgctgcttaacgaaggtttcttaatgattcaatattctgtttatgttcgagtttgtgtcagcaaacaatcggcgcagtttatcgagaaccgaattgctggctttactccgcctgcaggcttagtacaaacgttgatggttactgaacaacaatataataaaatgcatttcttagtgggcgaatcgagtgatgacgtccgtaattctgctgagaggacgttaattttatgaacattactttttatccataccacccctttagcgttcagaataagaaaataacggtttgcagtacaagcagtccagaagtgtataccaaactcattattggaatgtccggcgcacaagagaccgttaaatttagcaatgatcaatacgaattaatggattattcaaaggctgttatttggggtggggatgtggcagcaattaatttgaatcatctatttcaaaatcggttgattaaaaaattcgccgccgacttaacggatcagcagcgccagaaattaactcagttagatagtgagattcgttcaacgattttggatgcggcctttatgtatgaattgaccttagatgtcaatcaggaatgggatcttcaaagaatgattaagttctataatttacaattttcgactgtcgtccaacatgacccatatggtataattgagagtatagtacagacagcagtagagttaaatgaatcaaaaataatcacgttgatcaacgtttcgcactatctcagtatcaaccaatttaatgaattggtgaggttggtggcgacattgaatgtgaaactctttctcattgaattttcagaagaggttaaatctgatcagtaccagaaatgttgttattatcacatcgataatgattatgtcgaatggcgctatgaataaaatgaaattctgatgaaaaaacgacggttttagaagagtatcaaatcaatgagtagttcaacaatggaatttagtgaagtgctaactcaattgttttagaagagtatcaaatcaatgagtagttcaacttcggtcgttttgccctcaatgtcaactaagttttagaagagtatcaaatcaatgagtagttcaacactgaaaaattaatagacgaaagtgcttctgttttagaagagtatcaaatcaatgagtagttcaacaagtatattataacacatccgtattataatgttttagaagagtatcaaatcaatgagtagttcaaccgacagttaaaccagatgcggacaactatagttttagaagagtatcaaatcaatgagtagttcaacttagattcagttaaggataatgaccagcaagttttagaagagtatcaaatcaatgagtagttcaacttaccgttcgtttcagagtacggggcaactgttttagaagagtatcaaatcaatgagtagttcaacatcacctcatttgaatatgatcgggaagtagttttagaagagtatcaaatcaatgagtagttcaactataatggtgcccaagtaaacataactgctgttttagaagagtatcaaatcaatgagtagttcaacttattattaataatattgatgttggtgtatgttttagaagagtatcaaatcaatgagtagttcaactaaccagcgttaaatccatcagtattaccggttttagaagagtatcaaatcaatgagtagttcaactatttcctggtcaaaatcgttccaaaaggtagttttagaagagtatcaaatcaatgagtagttcaactaaaacaaagcaaagcgatgctagtcttttgttttagaagagtatcaaatcaatgagtagttcaacccctgatttccaaatttctatcccgcacgagttttagaagagtatcaaatcaatgagtagttcaactctaaatctgcattgattacagttgcactagttttagaagagtatcaaatcaatgagtagttcaactggatttgatcagtatatttatcattttgagttttagaagagtatcaaatcaatgagtagttcaactcttgtacttccttaatcgatgcgccagctgttttagaagagtatcaaatcaatgagtagttcaacatctgttgagcgcaataattgtggactcttgttttagaagagtatcaaatcaatgagtagttcaacaaggcattcatcccagcttgtgcttctgtagttttagaagagtatcaaatcaatgagtagttcaacttaattttatcgcttaaagcgattgaattagttttagaagagtatcaaatcaatgagtagttcaacttgacatactcatcatcgatatacaaatcagttttagaagagtatcaaatcaatgagtagttcaacgacaggaaacgtttgccggtctagcagttggttttagaagagtatcaaatcaatgagtagttcaaccaacgctaatttcgtatttttgggctacttgttttagaagagtatcaaatcaatgagtagttcaacagtcctgaaaataacgccatgagtattcctgttttagaagagtatcaaatcaatgagtagttcaacatataaaacttagtcgctgatgcttcatcagttttagaagagtatcaaatcaatgagtagttcaaccccggaactggtacggattgcgaaacgtatgttttagaagagtatcaaatcaatgagtagttcaacacaaactaatgtcgtcaacgcagtcttcttgttttagaagagtatcaaatcaatgagtagttcaacatcgggatggatgccgatgaattacttagagttttagaagagtatcaaatcaatgagtagttcaacagtcttcatgtgaatccccctctttctgcagttttagaagagtatcaaatcaatgagtagttcaaccctttaacagacataatggctttttgttctgttttagaagagtatcaaatcaatgagtagttcaacatcgggatggatgccgatgaattacttagagttttagaagagtatcaaatcaatgagtagttcaacctaacggtagctatatagttgactatacttgttttagaagagtatcaaatcaatgagtagttcaactggctgatatggtaactatctatgccaacggttttagaagagtatcaaatcaatgagtagttcaacaaaccagctttggtatccgcaacttgtgtagttttagaagagtatcaaatcaatgagtagttcaaccagttaattctggatttaaaaggattgccggttttagaagagtatcaaatcaatgagtagttcaactgcctactgcaatgtaggctaggtatttaagttttagaagagtatcaaatcaatgagtagttcaacttacccgctattattttttcagttagtacagttttagaagagtatcaaatcaatgagtagttcaacttttgccaaataaacgcgcccgtaaaaaaggttttagaagagtatcaaatcaatgagtagttcaactccaaagatttcaatctggttctaaattcagttttagaagagtatcaaatcaatgagtagttcaactgcgccatcatctgtgccgcctgtttcagagttttagaagagtatcaaatcaatgagtagttcaacagagcacaaccaataaaatctcgaacgctggttttagaagagtatcaaatcaatgagtagttcaacaatctgtacgttgtgctaacgtcattgagtgttttagaagagtatcaaatcaatgagtagttcaacacaggattaaggcgtggttatcaggataaggttttagaagagtatcaaatcaatgagtagttcaacaggcgattagagctattgccgacattctaggttttagaagagtatcaaatcaatgagtagttcaaccagaagcaattaaacagttatctgaacgcaagttttagaagagtatcaaatcaatgagtagttcaacttattatttacgcgtttgaatatgatgctagttttagaagagtatcaaatcaatgagtagttcaactcagccacatcagcatcatctggatattctgttttagaagagtatcaaatcaatgagtagttcaacgtagctacaagaaagagcctgattggcaatgttttagaagagtatcaaatcaatgagtagttcaacgggtcattcctgacttacgtaataggcaacgttttagaagagtatcaaatcaatgagtagttcaacaaacagcagagtttttaaacgtttcaacatgttttagaagagtatcaaatcaatgagtagttcaacgttggccttagctttgccggcattacagcagttttagaagagtatcaaatcaatgagtagttcaaccggtattgtggctgaccaaatggctcaacggttttagaagagtatcaaatcaatgagtaatattaacctatttcccgtgcgaatctattgaaaaagatcacgttgtccgcgtggtcttttttcatgcattcaagcattgaaaacagttctcaattagcatagaattaagagcgtataataattgctagaatgcgattcttggagggtcatctatgtctaaattagagattatcgatttgcacgtcggcatcgacggtaaggaaattttaaaaggtgttaacctggaaatgaacacgggtgaaattcacgcgatcatgggacctaacgggactgggaagtcgacgctttcggaaacgattatgggcaatcccaagtatgaggtactacaaggtcagatcaaactagatggccaaaatattttagaaatgccggttgatgaacgcgcccgtgcggggttatttttggcgatgcaatatcctgctgaaattcaaggggtaacgaacgctgaattcatgcgtgcggcgattaatgcacgtcgggctgaagatgatcagatttcagtgatggctttcttgaaaaaattagatcaacggatggcattcttggatatgacggaagaaatgtcagaacgttacttaaacgaaggattttctgggggtgaaaagaaacggaatgaaattctgcaattgatgatgattgaacccaaattcgccatcctagacgaaattgattccggacttgatattgatgccttgcaagtcgtttcaaaaggcgtgaacgaaatgcgcggggctgattttggctcattaatcatcacacattatcaacggctcttaaactacatcgtgccagattatgtgcacatcatgatgggtggcaaaatcgtcacgactggtgatgcgtcacttgcaaaacgtttggaagacgaaggttatgtcgggattcgtgacgaattaggcttggatatcaaactgactgacgacgaaagtaaatagggggcgattctgatgaagaaaacattagccatcacgcctgaacaaatcgcgtcattctcacaattgcatcaagaaccggcctggtttgctgaaatgcgtcaagcagcgtttgcgcaaattgagcaactcgaactgcctatctttgaaaaaattaactataaacattggccagtgatggcagcaaatgcgccaacagccgttaaatccgatttgagtttaatgccatctgtggcagcgaatctttcagctgatcaaccgtacgcagtacagattggtcagacaactgccaagttaaatttaccggcagaattggcagaacaaggtgtcatttttaccgacattttcaccgcgttacaagaacatcctgatttggtacaacaatactacatgcaagtcacagtgaaaccgaacgaggatcgcttaacggcttttcacacagctttgatgaacagtgggctcttcttgtatgtgccgaaaaatgtggtgattaagcaacccattacggcttattatgtacaggacagcactcaacccgctgattttattcatcacgtcctcgtagtagccgaacaaaacagtgaatttagttatcttgaaaatctccaaacagcgggtgaccacaagaacttagcaaatgttgtcgtggaagtgattgctaaagataacagtcacgttcatttttcagcggttgatgcctttggaaaatccgtgacgacttacttgaatcgccggggccacttgatgcgcgatgcgcggattgattgggcattgggatcaatgaatgatggcaatatcatcggtgactttgattctgatttagtgggtgctggatcacatgctgaaacgaaagtggtcgccatctcaactggtaaacagattcaagggattgatacgcgtgtgacgaatattgggccgcgttcaattgggcacatcttgcaacatggcgtcattttagaagatgcgacgttaacgtttaacgggatcgggcatattttaaaaggggctaagggtgccgatgcccaacaagaaaatcgcgtcttgatgttatcgcggacagcacgcggggatgcgaacccactcttattaattgatgaaaatgacgtgcaagctggccatgctgccagtgtcgggcgcgttgatgaacaacaaatgtattatttaatgagtcgcggtctttcaaaagaagtcgcgcaacgacttgtaattcgtggtttcttaggcgctgttctaagtgaaattccggataaaaacgtgcgccaacaattaacggacacgattgaaaggaagttaatcgatggtcaaccagttaaatgattatcggtgcgactttccgattttagaccaaatcgtcaatgatgaaccacttgtttatttagacaatgcggcgaccacccaaaaaccacaagccgtgattgaccggttggtggcttattaccaaaatgacaatgcgaacgtgcatcgtggtgtgcatactttagctgaacgagcaaccgcccagtatgaagccgcgcgcacgaaggtccaaaccttcatccatgccgctgcgagtgccgaagtgattttcacaaaagggacgacgcaaagtttgaactgggttgcaggcagtttcggcccaaccgtggttgaagccggcgatgaaatcgtgattagtgtgatggaacatcatagtaatctcgtgccgtggcaacaactggcgcagaaaacgggcgcgaaattgcgttacatcgacttattaccggatgggcaaatcgatttagagtcagcacgccaggtgattgggcctaagacgaaaattgttagtttggcgcatgcttccaacgtacttggggttgtcaatccgattaaaacaattgcggctttagtccatacacaaggcggttacatggtggtcgatggtgcacaagccgtgccgcacatgatggttgatgtgcaggcacttgatgcggacttttacgccttttcagggcataagatgcttggaccaaccggcattggtgtgctttatggcaagcaagcattacttgaacagatgccacccgtggaatacggcggcgagatgatcgactttgtgggcttacaatcttcaacgtttaaagaattaccgtggcgtcttgaaggtggaacgccaaacattgcgggggcaattggcttaggggccgccattgattatttaacgcaaattgggatggatcatatccaagcccatgaacaagcgctagtcacaatggctttaccgcagctccaagcaatcgacggcctcacgatttatggcccacaagatgccgcccaacgcaccggtgtgattgcctttaatctcgacaatttacatccacatgatttagcgaccgccctcgatatggaaggcgttgccgtacgtgctggtcatcactgcgcacaaccgttgatgcaatggttgaacgttgccgcaaccgcgcgcgctagtttttacctctacaataccgaagcggacgtgaaaacgttcgtgaccgccattcaagcagcaaaggagtttttccaaaatggcactctctaaattagataacttatatcggcaggtcattcttgaccattcgcaacatccgcatcatcatggtcacttgacgactgccgatcatgaaattgaattacgcaaccccacctgtggcgatgtgttacaacttgaactggtgctcgaagacgggcagattagtcagattgctttttcaggggaaggctgtacgattagccaggcttctgccagcatgatgaccgatgccgtgatgcataagacaccggcgcaagcggaggcgatgatcgaacgcttttcggatatgatgattggtgatcgtgacgaagactggtcattgttagaagatgccgcgattttacaaggggtgcaacaattccctgcgcggattaaatgcgcgactttagcttggaaggcgctccacaaagccttaaatagcgatgaccgacgtgcaacaaccggtcaaatgatgaaccacgcagaaacggaggaaactaacgaatgacagaagagacaacgatgccccaatttgaagagtacgactacggctttagcgacgatgtagagcccgtcttttcaactgggcgcggtttaacggaagacgttgtgcgcgccatctcgcgtgagaaaaaggaaccacaatggatgttagatttccgcttaaaatcatttcacgcttatgaaaaaatgccaatgccagatttcggaccggacttatccgatcttgatttagaacacatgttgtattatcaaaaggcaacggacaagcaataccgcgattgggaagatgttcccgacaaaatcaaagaaacgtttgatcgcttaggtgtgcctgaagccgaacgtaagtatttagcaggttccagtgcgcaatatgaatcagaagtggtttatcacaacatgcgtgaagaattcgaaaaacttgggatcatttttaccgatatggataccggtttacgcgaataccctgaaattgtgaaggaatacttcagtacgttggtcaaaccaactgataataaattctcagcgcttaactcggccgtttggtcaggtggcacgttcatctacgttccaaaaggcgtgcggacggatattccaatccaatcgtacttccggattaacgccgaaaattcaggtcaattcgaacggacattgattattgtcgatgaaggcgccagcgtgaactacgttgaaggctgtactgcaccaagctattcaagtgatagcttgcacgcagcggtcgttgaagtctttgtgaaacgggatggctattgccgctatacgaccattcaaaactggtcaaagaacgtttatagtttggaaactaaacgggcccaagccatggaaaatgcgacaatggaatgggtcgacgggaatctcggttcgaagatgaccatgaaatacccaagtgtctacctcgatggtgaaggtgcccgcggaaccatgctctcaatcgccgtcgccggcgaaggcgttgatcaagacagtggcgcgcggatgattcacgccgcaccgaatacgtcatcctcaatcgtttcaaaatcgattgccaaagatggcggggccgttgattaccgcgggactgttcgttttgaacgcgacagtgacggttcgtttgcccatgtcgaatgtgatacgattattatggatgaccgctccagctctgatacgattccgtacaacacaattctaaacggcaacgtttcaatggaacatgaagccaaagtctctaaaatttctgaagaacaactctattatctgatgagccgtggcatctcggaagccaaagcaaccgaaatgatcatcatgggcttcgtcgaaccattcaccaaggaactcccaatggaatacgcggtggaattgaatcgattgattagttatgaaatggaaggcagtgtggggtaattgaattgcataagctagaaatgcctatttgaaggcgtttctggctttttttgtttgtgcatgtagaaagtaacaccaaaagtaacaccatttggatagaaatttttagagagatttaactagtatgcagtattaaatggtatgataaaataaaaattataggaggtatggattgaagtcaatatttgagacagattttaagagacattcagaaccgcgtttaccttccacagctcaaataaatcattaatcgcgattaataacttatttgaaccctggaaagcattaaatcaggcggccatttggctcgtaagtgttgcaatttcaacttgtaagggggtctggtagcccagtgaactatgaattctcttcctattgtagaaagcatgttgtagaaagcatgcacatattcaaaaaggacggcagcggcagtttcataatggatgtaagccaagccgtaaacgcccaccaagtgaacatcaatcaattttgtgccacgtatcttaatcgactagcggccggattggcccaagcggacgaggcgattggtgctcattattgcaactggtcggcgattattggccgacgtttgcaaaatgggcttgtcattacacagcttttagcggatggcacgttaattctgagcaatggctcgcaagtggcagtcggccaaaagattgattttaaggaggagctgatttaaatgacactatcggttgccagaaaagttagcttagtcgggatgtgcttggcgttattaatggttagcgctcaagtcagtctaccgatttcgctggttccagtaacactccaaacgctcgcagttggtgtaattggcaccacgttaccatggcgcttaagtcgactggtcatcgggagctatctcatgctaggcatgcttggcttaccggtctttgcaaattatgccagtggggctgcagtgctggtcggaccaacaggcggctatctgattggttttatcgcttatgtggcaattgttcactatagtcagcaactatttggacaatcgaaccgcgtacttctcggcggcaatgtgctagcaagcattattcaactcggatttggcacactctggctaatctggtcattaaaattatccgtagtgaccggcttaatgaccggttttgtgccgtattttccgattgaaatgatcaagagttgtttagtggtgatgattgccagtcgcgttcaatcaattagttaaaaaaacactatccaatcggatagtgttttttagtttaaggtagattgcaaatttaatccgaatttttggacaaatttgtcagcatcacctgatacggtgtttgccagtcgagtattttaagcggtcgctggttaatttggagtaacgtcgtcgttaaatcttgagcactaatgtgctcaaaacgagtccctttaggataaaaataacgtaaattccgattaaagcgttcattactaccacgttcagctggcgtataagcatggcagtaataggtcttaataccatattgtgattcaagtgatactagcccactaaactcagtgccacggtccacagtaaagctgtgcaccggaccattaaaagtggttaggaacttagttagggcttcattaacagtcgctgtcgtccgatcttttaaccggtatgcccaaaggaaccgtgatttgcgatcgattaaagttaataaaactgccttactatgcccacgaggaccaacgactgtatctagttcaaaatcgccgatgcgcttacgttgattaatcatcatgggacgctgttcaattgatcgccccaaagattgattatatttggatcgttggtcaacgttacgccgttggcgtacgccatgttcaggtagatcattcaaggagaaaccaattctcccctgatttagccaattataaatagatttagtagctagtttaaattcgtgagcaatcattcctggtgaccagcttagacgtaaatggttgagaattttttgctttaactcatcgctcagcttagttttccgaccacatcgtgatcgcttgtattcggcatctgtttgtgctaattcagcctgataaggttgacatcgagataattcataagaaattgttgacggtgatcggttcagccgaacgcccatttagatattggacagccctagttcacaaaaggtttcgattttaattcgttcggaataggttatactagacaaaagatcagctcctaaaagatgggtttgtggtaaacaccattttaaaggaagctgatctttttgtccgaacagcgttcggattaattttacaatctaccttaacgctttaattttagcgattaacgcgttatttttaaggtatttggcaaaaactaacgcggtttcgcgatcttctgcatagtctcgaccgctttgttggcgcgcccgagcacggaggtaatacaaatgatcgacttgtttgatgatttgatttttttgactcagtttgagggctttcgtcaaaaactcgatagctgcatcaatgcggtgttggttaatcatataggctgctgtgtgacgcgaagcaaataggacgcgttgaacatcaatgacattgatgtgatcaagttggttgatgaaattgatattattattgaaataaaaatcagctaattcctcgccagcttcttggtaaattaaacccataccggtatttagaagtaacttcaacgttgaagtgtcgtcaccgatggccgctgtgaacgagttataagcggaaaaaatctgtaattcagattgatggtcaaggtaacttaaatagccattgaaaaagaagaagatggcgggataaggatgttcggttgccttgaagtcgatatcggtaattaatgcggcagcagggccagaatcgcctgctaataaagcaacttccgcagaaatcacgccttcgtcactggcagtgtcgagcgcgttaaattcggtgaaaagttcatttaatgtcaatccaagccgtgtacaaatcttaattagaattgggattgtggggggcagatttttcttttcaattttgctgattgtattttgcgtgcaaatccccgctgctaattcagactgtgtcagttgcttgttgagtcgctgttgatggatcaattggcctaaaaacatttttagcctccaaatagtaattatttatctatatttatgattaattatatacgtttaatgcagacaagtatacgtttatgacatttaatccttttaaaaaaattacgtgataaaatcgaaatgagtcaccaatcatgggtattcataatatgaaaggaggggtatgataatgatgagtaacattcaaaatttaattttctggttttggaattaaggttcgagtagggagttttatgcatggcaatgaaaatgccgctggcaatgcagattgtcattaatctaagtacgtttagttcgtttctactattagtattatttttgacggggaagttgaaacgaacgaacagatttcaactactattatcagttggagtcggcattgcttttgttcagggaatggatttattaattggaaattttcttgaagagctatggctgattttggcaactgttggattatatggttggttaaatggctttaaaaatctgcgtaaattaaagacaagttatgcgttaattatcgcaaccatctttagttacatcatcgtgatgctatcatcggttctaacaacggtggggttaattgggtatactcacttaaagggccttgataatctgatgagtagccagtttaattggcaaatggtgtgtttaattatgttgagtcaattattgattgcagccggattaggattaattgtccaacggttagatcagcttattaaagcatccattgcttcatacggtatgtgcgtggccggcacgattttagccggtctcgcgttatttgtggtggcagtgatggtgctttttgatagctttaagcatgcgaatctgccggttgaatatttgtaccttgtgttaggacttgtgctattactattagttttggtgattgtgggaatgcttttgtatacgaaagctgtgattcgccaaaatagaatcaacgtagaacaagaaagtcagcgaaatctaacgctgtatgttgaacagttagagcgtaactaccgtgaaatacgcaagtttcgccacgatatcgccaatgctttattggctttagagacaattatcaatgaacaagggagcccagttttaatgcaggattttcatgatttactaacgcattatagctttgacacgattcaagatcaggcaattggacggtttcaagagattaataatgcttatattaaaggcattatttttagcaagtatattgaagcacataataatcggattccctttaatttagaggttcaaccggatttatttaagcaacaacaacagtattttgatgaattacggattctgggaatctttttggataatgcaattgacgcggtaaatgatattaaagatggttcaatcagtgtcagtttattcgagcaaaagggtaagatggtctattgtgtcaaaaatatgattaatacaccagtagaatttggtcagctttatcaggctggttattcaacgaaggggattaatcgcgggcttgggctcacaactgctaaagaaatcacggatatgcgctcagattttagcttaatgttaaaacaagatggagactatttcgttgcaatgcttgttgttgaacaggaggagacccatggttgatatttttttatgtgatgataaacaggttttactagatagttatgaagagattataacggcatatattcaacaaaatacattggatgctcaggtgcgtttgaagactaagaatggctatgacctattaatttttttacaagaaagtcaaacgcaagggggcgtttactttcttgatattgatttagagaatgacgtgctggatgggatggaattggcgcttaaaattcgtgaattggatccatatgcacagattgcgttcgtttcaacgcatgacgaacttttaatggaaaccattcaacgccgaattaatgttttgaattttattttgaaggatcgcgggttggcgcaggttcgcgcagatattcaagcaaccattaacgatgccattaagttacgacaacaacaggtgccgttagctgaagaaccagcttattttgaatatgatgatggattatcgtttgaaaaagtggcaattcaagagattaattatttcgaaacagcgcataaagcacggcacgtcttcttacacagtgatcatcggttaagtgaatttgtagggaaaatcgtgacgattcaagcgcaattgccacaatttttcagagcccataagagtatcctagtgaatccggacaaagtcgtacggattgataaggagacgcatcaagtgatatttgcaaatggcgatacatgtgatgtttcgtaccgtcgaattgaggcattacttaaattgatacaagcagacaagtgttaaaaattaagcaacgccaaaaattcgctttcaaacgtggtacactaaaattgatagtggatgacagttttaggaggctacggattgaaactatatacaaagaccggtgacaagggattaaccagaattatcggcggtcaaaaagtgcgcaaaaacgcaattcgtgtggaagcatacgggggtgttgatgagttaaattcatacttaggtgtcgtcatcagtgatttacctgattatccggcattgagaatggaattggttgagattcaacaaattctgtttgactgtgggacagatttagcgacgccggatgattcgcgggggtatcggacagacaacgcatacacgaaatggttagaagctaagattgatcagtatgcagatgttccacctgctttaaaagaatttattttacctgggggagtaccatcagcagcgaaactacaatattgtcggacaattgcgcggcgtgttgaatgccaagtcgtcgccttgcaggaagtagaaccgattaacgaagctgtattaactttcttgaatcggctctctgattatttatacgcgattgcgcggtacgtcaatcatgaagagggcgaaccagagacagtttatcgaagaaataaaacaatttttcattaaaaaaatcgccgatgtgcggtttttttaatgtcgaaattaagggatgttttgaattgctaacgcagcaagcttccactataatagcttgaaaagaggaagtgattgtgatgtttaaatcaaaagaagctaaagtcgaggcttacgaaatgctcttaaaacaacaagctgctttgctggcaggtgaaacgaatttaattgctaatctagcaaattcttcggcgttattaaatcaaatattaccggagactgtttttgcgggttattatctgtatcaagatgctgagctgattttaggcccatttcaaggaaacgtctcgtgtatgcacattgcactaggtaaaggggtgtgtggtgaagccgccgcaaagcaaacaacgttaattgtagaagacacggcgcaacatcagaattatatcgcttgtgattcggctgcacgttctgagattgttgtgccaatgatcaaggctaatcaactaatcggtgttttggatcttgataaccgcgtcgttggcgcttacgatgaggtcgaccgagattatctagaacagtatgtcacgttactgatgcaaaactaaaaaaagcaaatgcgtttctaattgatgttagaagcacacttgcttttttttaattgattagagtgtcttgattttttgtttgaggtggacgcaaacctgtgtcaccacaatgattgccaagagccggtccagataatccgtaccggcttgaactagtgtaatgctgacaaactgatttagtcccaagccgcttagtagttgtacaattaaacttgaccctgaagaggtgataccgtggaacaagaagtaagtaattaatgaactgacaattgtgccgggaatggcgacacctaaagcaacaaggggtaactcgcgtttcgtccgttggtggtggtataagaaccatccagcgagtaagccggttaatagaccgtctggcaagtaataaagcgcaaataagtcggtcgtgacaccgctgatgatgctactgcaagtggcagttaatgcgcctgccagaggacctaatagggtgctggctaaaatggtgccgacgctatcgagatagattggtaaccgtaaaaatagggcaatgttagcgcctacgtaattgagtgcaatggcaagtgccagaatggttaagtgttgtgttttaaattttcgcataataggttccttatctaagttttggtaagtccgttttaatgagggttgcttgtgcatttaaaacgacggtcaaaaactgttcaaagaaacgattggtgtccaccttagttaagatgaggctattggcaggacggtgccagaaatcgaaccggtcaaccagtgtttggccaatgctgatgccggttgtttcgacggtggtataactttcaaagccgtgacaaagggttggatcgataaaataggcgactgctaatggatcattgatcacacagccgataatgtgttcatattgccaatgaaaatcaaaataaaactgggtgatggcttttagatagtcgccgacttcaggattgacacgctgacaataagccagcaatgttggcgtgaagacaatttcgcgggtcacgtctaagccaaccatttcaatcttttgatcgagttggtcgaataccaacagtgcggcatccggatcgctccagtagttgaattcagcaacgggtgagcagttaccgtgactcttataggtcccacccattgaaacaaagcgggcacagtgccgacctaaatctggattccgctggagcgcagtcgcaatattggtcaatggtccgagtgcgataatactgatatcgctcggttgactaaaagtggctgctaaaaaatcagcggcggattgttgtgccggttgaatagtggataggcgcgggatatggctgtcacctaaaccatccatgccatgcgtatcctgcgcactgacaaatggtttatggagcggtttatccgcaccaacataaacgggaatgtcgagccgcccgagacgttcaagacacttaaaggcattgtccacgccgatttggacgggaacgttgccgcaaacaatggtgattgcaacgacttccaccgctggcgattgaatggccaaattcaaagcgagcgtgtcatcgatgcctggatcgcaatcgataatgattttgcgagtttgcatttatttctaacctccttgagatccttagttttttattctgggaagtttccgaaccagtccaagtagttttacttgattttaaatgcacccctttatgataccgagttggtggacgggtgtaaatagtagttatttttaaaaaacaggcttgacagtgattagcgaacttgatattataataaacgttgtaagatttgatatggagaattacccaagtctggctgaagggaacggtcttgaaaaccgtcaggtgggttctgcccacgcgagagttcgaatctctcattctccttaaagtaaaaagcggttcgcggatgcgagtcgctttttttgttgggtaaaataaaaaaccagagtgcatgcgcactctggtcgattcggtttaaaattagtttgtgtaggtttggaaacgacttgcatcggtattgtagtctttagcatcggctggattttcgattgaaccaaatggcatttgcgcacgaagtttccagtttgatggaatgttccattttgcagtaacggcttcatcaattactgggttataatgttgcaagctagcgcccacatttttttctgcgagggctaaccaagtggcatattgtgccatgcctgaagcttgttctgaccatgttgggaagttttcggcatataatggcacgttttcttgaagattcttaacaacgtcttgatcttcaaagaacaagattgtcccgacaccagcggcgaatgaagccaatttagcttgtgtacttgggaagttttccgcaggtgttaatggttttaaggcagttgctgtaatatcgttccaaagtgtttcatttgcttttccaaagagaataatggcgcgtgaaccttgggcgttaaaagcagttggtgtttctttaatggtgttgaagattaattctgataattcagcttcgctcattgaaacgtttttgccaagtgcataaattgtccggcgtgtttgttgtaaatcgaataattctgtcatgttcattactcccttgtgaaatcgtttttatcagtgcatgcgaataatatagcatacttattaaatgtaagcaatgaaaaaagcgaaatccctcgtttgtatttcgcaattaacagcatttagttcgattgtattttacaattatagactagactgcagtttaacgggcaattcagattttgaaacggcagtccaagaattgacgaagcaccccttggcatctaattttaagtagtgattaggttttagtgcgcgcggcgcttggaaaacgacttcgtaatgactgccatcagcacggtaagcaggttgccggtaaaggtaatcgccatgtgcttgttgtgtcccgtattggtgtgctgttttaacatagacggcttctctggaaattaagaggttgaaccggtcccactgttgggcaaggtcattgccgtccgtcatattctgagttgtggctgatccgataattggaccgccgataacaattagtccaagtgagaacagtaatagaatgatttttttcatgattgacactccttgtgaattgatgtcttaatcgtatcaagctagaagttacattgattcagtctaaaggtggaatttattctaagcgaggtgatgattttgtcatatcgtgggcctgtttaaggattgatagtttatgtctgtggccgaatgcattataatagttagttatgagatgttttcagtagagagtgggtgatgattgatgaaggaagttcaaaatgtgatgcaacagttagacgcgattcgtagtgcattgattaaaggggacatctatcaatcaattccggaaaaagtattggtcgtcatggatggcgtccaatataagacgcggcggacacatgtcgtagtacctgaggacaacgagtcagtcttgcaacgaatcacagcaattgatgagcgaattaaaaccaaaggcaaagaagcgaccatcagcgatgaagagctcgatgatttattaaggcatcttgcaagcccagattcgcaagtgcgcgataaaggtgttttttacttattcaatcgattattacggcagacggttttaaccccagcccaattgatttgggtcaaggaccgcttattgcaagatgattatttattcgcgcatattttagaacctgaaaatgacgctgtttttttacgttcgtttagcgcgatgtttttggccgggattttatatgctaaccgcactttttatcatgtattaagtacggccgaattattggcaattgaacggcgagtaatggcttatacagtcatcgaattagattcacgaggatacgttgatggtaaaggctgggcgcatgcgatgacgcatatcatcaatgtctggtcagaacttaacgaaacacctgaaatccaacgtgcggataagattttgatgatggcaattgtactacaggcgtatcgcttctctgataacgcactcgcatatggtgaagatagtcatctgacgaacgttctaatcagtttaatgaacaagcatcaactctatgtcgattattgtttaatcgtcttacaggagtggcagcgttcattgttgactatggcaccacaggataccgttggtttttggaatcggtggtataaccgcaatcgctttttacagtcattgttgctacaacctgaattacctgataaaattgcggattacttacggaagatttcagatttattttaattaaccagataggattgagagaagatgacagtaaaagggattatttttgacgtcgatggcgttttagtggatagtgaaccgtactattttgaacaacgcttagcatttttgaatgcaattggcgcacgactaacggcagaggaaagtcgtaaacaaattggttccaatatgaatgccgttttaaaacagttgtttccaaaccatactgttttggaacgagcggcaattaaaaacggctatacgtcgtataaagcggctcatccaatcgtttttaaaaatatcatgaacccagacgcgcaaccgttattagcaaccgttgcaccgacatatcaaatcggtttggcgtccgctggtgagcgcggaattattcaacaaatgttgttggaaaccgcgttagaaccttattttgaaacggttgttagtggtgcagagattgcgcataataaaccagcaccagatgtgtatctagaagcgcttaaaagaatgcatttagaaccaaccgaggcggttgcgattgaagactctgcactggggattcaagcggggaaggcggctggtttaaccgtcatcgcattaaaaccatttgatccacttttcgcgattgatcaatcggcagcggattatcaaattgaatcattaaaagaagttccggcaatattagcaacgttataaaaaacggcttccgctgcaggaagccgtttttttgtcgtactatcgaacagcaccttaacaattaattaaagataaatgtttggtaatgtttagtatgtagtgtaaaatacttattggataaaaaaataagtaatgccacataactagttcatagtgtataataaacgcaactagtagcgtcattgctaattgatgtaaattacttaattgggttatattttccggaaattaattttaaattaaataatgatgtaattggagtatttaaaatgagaatattaggggataaactaaaacaaatccgtaaagcacgggggatgtctcaagcggagttagctaagggaatttgtacgcaagcaacaattagcttaattgagaaaaaagaacaggtgccaagcacaaagattctcttggaaatttgtaagcggcttgaaattacgttggactcagtgattgtgcaagaagatgatcaattacacgtcttgttgagtcgtgtgcaagcattgttatttaccaatgaattcaaaaaagcacgtgatttgattcagcagatctacacagatcgactggtcaaagcagatgattacaaacggtattattatttccaaggtcaaattaagttattgctggagaataaaccggacgatgcacttttctttttcaatcgtgccttcaatcaatacgttgtttctcagacggatgtttacggtattctatgtattatcggcattagcaagtcctatttgatgaagggcgctttagagcgtgtacggatttatgcagaacaagccgttgaaatgttggagaattctgatccacttgctatggccgatttccaagttgagttgcagatttataatcacttagcgggaattctttttgaattgaaggattatgaaggtgcgattaagtacgctcagcttgcgattgacgaagcaatcgataagcaaagtctttacttacttgatgcattgtatttcattcttggtcgtgcagaacatgcgcttcatcgagagaacgccttacaggatttaacggttgctaaaacattggcgttaatccggcatcatccagagatcattgtgcaagttgatcaacaattggctgaataagtggttaaccactaaaaaaagccgggacataagcgtcccggctttttgattgctaatttatgcttcttcgtgaccaatgctactgcgtttcttgttgagtgcgtgtttattatctaaatctgtccgcacaacgagcacgtcgcaaacggcggtccgagtaacgtattccgttacagaaccaatcaagagacgttcaacagcgtttaaaccagttgcaccaatcatgatgagatcgatatttttcttttcgggtacttcgcgggcaattaaactctttggtgcgccatattcaatgctatagtcaacatcttttaagccaagttcattggcagtcacgatgtattcgtccattgttttcttagctgtttctgtgacttgttcaaccattgcggaatcaaaactagagatattttggaaggcgcgggtatcgataacgtgaatcaagtggagttgtccgttattccgaagggcaacttcaactgctttacggaaagcgagttcagcttcataagaaccatcgattgcgaccaaaatgtgcttgtattgttgtaacattgtcatcacctcatttaattttacatctttattgtacgctagttcagtgtcaaaagtaaatcttaaaggttagttgcaaagctaaggccgactaagccggcgattaaactggcagcaacgagcgtcaccaatgtccagactagtggcaatagccagtaaatcaaagccccgcagattgctacaccgatgagcgcaatccctgaaaagtacatcaatcgacctaaataccggttttcagttaaatcaaagagtaggaacttcttgtcttggtagtaacataaaatcgcaccaagtagggcgataatgattaaaaaaacgattatggcgatttgaatcaatgtgcaacctcctaaaataatcaacaaaaaagggccaacgtaaacgttagcccggtcaaagtcgttggactttgggaaatctagtggtgccgtagatgcttcccgatagttgagcccgctagaaaatgcaggtgggtcagattattattagacttggttccttcgcgaaaaagtctacactcgctaataactcatccgtcccattaacgaattacttgatcggtcaacataaggtgggaagacgcgcacaccttagaaatcctactattatagtagcacgctcgtgatgttaacacaacacttttgtaaccgttcacttatgcggactggcttggcgcaagcgttctagctgttgtttgaggacttgctcgtatttaccagttgcttttgcttcgtaataatgactacctaagagcttatctggtaggtaatcttgcgcgacccagtcgttgggataattatgaggatatttgtagtcgacaccgtggccaagtttttcagcccctgcataatgggcatcacggagatgatcggggacttcaccggcttttccagcgcgaatatcagctaacgcgttatcaattgcggtgatggccgaatttgattttggagataagcagagatcaatcactgctacggccagtggaatccgggcttcgggaaaaccaagttgtttagccgcagcaattgcctcgactgtacgggcacaggcttgagggttggcgaggccgatatcttcgtaggccattgtcatcaagcgccgactaatcgacattaaatcaccggcttcaatcaaacggcccatataatggagcgcagcatcaacgtcactgccacggactgatttttgaaaggcggagatgacatcgtaatgggcatcgccatctttatcatgagtaatggcttttttctgcacgcattcttcaataacgtcaatatcgatgtcgatgacgttggtgtctggattcgctggtgttgaacgagcagcgagttcgagggcgtttaaagcactccgtaaatcaccgtttgtgacgcgggcaaggtattgttcagccgtttcatcgagattgatggctagtgcacctaagcctttttctttatctgtcagtgcccgttgaatggcgacatgaatgtcggcttcagtgaggggcttgacttcaaaaatttgggcccgactccgaatggcagggttgatactgatatatggattttcggtagttgcaccaattaagataatgcggccactttctagatgtggtaagagaaaatcctgtttggttttatccaagcggtgaatttcatcgaggagtaaaatcacggtgccactcattttggcttcttcagcgacaatctgtaaatcttttttactatcagtggcagcattcagcatgcgaaaagcgtactgggtactaccggcgatggcactagcgatactcgttttaccagtaccaggcggtccgtagagaatcattgatgagaggagtttggcatcaaccattcggcgaatgattttttgcggccccactaagtgcgtctgaccgacaacttcatcgatgttagtcggacgcatgcgaaatgcgagaggttgttgcatagcgttcatcctttaatgtttaggttgttcctagtataacatgtcgcgcaaattcgtagtgattatcgttttaaaaggttttagggatgtgtataatgagttgtataagactgaattaagaagaggtttcaaaatgcctaatcaattatttgagaacattaaacaattacgcttaacacctttattgaaccaaggtgcttttggggtcgaaaaagaggggcagcgagtgaccggattgggcgcattgagtcaacaaccgcaccccagtgagttaggatcgcgaacgtttcatccatacattgcgactgattttgcagagatgcaaacggaactggttacggataccttcgaacagaccgtagatgtccaacaacaattattagcgctcgaacaagtattgcaatcaagtatggccgattcggaatatatttggcccctcagtatgccaccgttgttaccagacgatgaattaaccattccaatttcagaatacacaccggcggtaaaggcctatcgtgactatttgacgaagcgctacggtcgacgtctacagatggtctctggcatccattataattttagcctgtcatcgacgttaattgtgcgtttatttgatgaatactatcatgatcactatgtgagtctaaaagattttagcgatgcgttgtacatccagattgcgcaaaattacgtgcgttatcactatgttttaacgtatttatttggtgcgagtccgatagcggaaccaggctttttagaagatatgacgaaattaccagaacaccctgtacggagtttacgctcgagtgaattattcggctacagcaataagcaattattaattcattttgattcagttgccgcatatgttgattcaatgcgccaagcgattgctaatggcgacttaatttcagaacgcgaattttacggaactgtgcggttacggagtcactcattggatcagatgttagagactggtgtggattatttagaatttcgggggtttgatattaacccgtatactgcgacggggattgatcaacaacagctagacttcttacacttattctttatgtacttattatccttgccgaaattatccggtgatttagccactcagattcagacgggtcgtcagttaaatgacacagtagcattagagaatccgctgcggccatcgcagctccaaacacaattgaagactgtgatggccgatttggcccaattcattacggattatcatctgaatgagcgttttaaacaagcttggacagtgatgaatgagcgtgttcaggaccatcgacaaaccttaagttatcgcttaacacaagcgattgaagaggactcgctaaaggcatttgccctcaaacaggcaaaacgttttaaatgtgagctgacagagactccctatcagttacagggatacacggatatggaattatcaacacaaatgctgatgtttgacgctttccaaaaagggctgcatgtggctgttttggatcgcgatgaacaatttattgagctgacctatcaacatcatcatgaattagtcaaaaatgggaatataacgagtttagatcggctaattagtgggccgttagtggataataaggtagtgactaaaattttattggcaagtcatgttatacgggtgccagcgggtgccgaatataccgctttagagacggcagtagcagattatcaagcggcgtttggtcagcgcgcgattgtcattaaaccaaaacacagtaacatgggggcgggcattagcacatttttaacgcgtccaagtgaagcggacttcattgctgcttttaaactggcacaaacgtacgatcagcaaattttagttgaagaattcattgcgggttcggaataccgtttcttagtgatgaatcataaggtccaggctgttttagaacggattccagccaatgtcgtgggggatggtcgttcaacaatcgcccaacttgttgctaagaaaaatgacaacccattacgcggcgaagcgcacctgacaccgttgcaaaacattcgcctcggtgaacgggaattgctcatgttgaaacaacaaggttaccgccctgaagatgtgccattgcgtggttcacaggtcttcttactacaaaattccaacgtctcaaatggtggtgattcggttgacgtgaccgatgagatggatcaaagttactttgcgattgctgaacaggttgctgaaattttgaacctcagtatcacgggaatcgatatcattgtgccaaacttataccaaccatatgatccggaacaccctgagatggcggttgtgctagaagcaaactacaatccagcgatgttgatgcacttgttcccaatgatgggtcaagcgcggcgcgtttcaatgactgtcttacaattacttttcccagaattagcgattgaaaccgactaaagtaatgcaaaaaggcccgcacaagttaaactgtgcgggcctttttagtgttaatcgaaaagatgttttaagaaaccaccttttttggtgggtgcatcttgcgttgcggtttttggatcagggtatagtgtatcgagcgtaattgcctcatggttaatcgcgtctttggcaaccactaacaaaccgaaggccgttggttcggttttggctgtttcgttgttaacgagcgtgaacggaatcccgtgtgctgaaagggccgctaaataatcggtagcagcggggttcttgccgtttaataagacggaatagggcttataatccgtaagatgcgcttcgaatttagcttgcgcagtggcgagttcctggttagtaatgcctaagaagacgcgttcacgtaatgagccgaggtagcggcggcgttcatcgggattggtttgtggtgcgccgtgcatggcactatccaagtgttgttgtaattgatcattatctgacaaaatagtcgcctcatttctgaattgtgctatattagaattaaacctaagtataccatgttggaggaaaaagatgtttacacgtgctgattttgatatttttgatgaccaaaccttaaagggccggttagacaagatttatacgcaacttgatccaaagtttgaagtatttggtgcgcaattgcaagcagaactcgtagcagaaacaaaacgcgaattctcgttgcatattgccaagcatttacgccgcttcaaaaatccaccaatgaatacttggatggcacttagtgagagctcacgcgggtataagatgatgccgcactttgaagtcggtttttgggatgatcggatcttcgtttggtttgctttaatggctgagatgccagataagacggattacgcaccgttattggcaagccaaacagaaagcctcttaagggactttgccgactatgatttaagctacgatcacatgaccaagcaaaaattcccaatgtcatcggagaacttgaaactgattcaagataagtttgctaagaccaaaaaaggggagtggctcctcggaaaagtttatctgaaagacaacccattattcgaccaacccgaagctctcatggccgatattcaaacgaccttgatgaagatggtgcctttatatgagttggtacagactaaatagattaaatcagacgcgtgtgctaagtaggcacgcgtctttaaatgcgcaaaaaaagagccagacctaagtctgactcttttaattgaacagataactgcttatctgttgtagaattcaacgattaaggcttcgtcgatttctggttctaattctgaacgttctggtaaacgaacaagtgaacctttcattgtgtcagcatcaaagctaacgaatgaagggcgaccaactgtaccttcgattgcatccttaacgattacaaggttcttagatttttcacggattgaaatttcttgaccaggttttacttcgtatgaaggaatatcaacacgtttgccatcgacagttacgtgaccatggtttactaattgacgagcttgtgcacgagtgcttgctaaacctaaacgataaacaatgttgtctaaacgttgttctagcaagatcatcaagttaacaccatgcttgccttcgcggattttaccagcgcgagcaaataagttccggaattggcgttctgttaaaccatacattaaacgaagtttttgtttttcgctcaattgcataccatattctgaaatcttaccgcgacggtcgttaccgtgttggcctggagcgtaagggcgacgagcaagttctttacctgtgcctgatagtgaaattcctaaacgacgtgaaagtttccactttggacctgtataacgtgacataaaaaaatcctccaataaatgttttggagtaaaataatccgatgtaaacttagtaatcgttcagttcacttattaacaatcttcacctttgcagccgcaaggttacacaattgaaccaaaactctgggcaaatgaactgttgacggctttaccgtttactgctgcattattttacacaatggctagtatagcgtacggtgtgcggcaacgtcaagcaaattcagattaaaattgcagcttttctaaagtttatcgctaattattgctgaaccgttatcttattcatgctataatcaaacatagtttaatgaattgaagtggatgaacggactaataaatctgatttaaattgtaaaagggtgtgtctttgaatgttttacattctcattggaatcgtagtcgtcgcactgattggctacctaagtgttgttttttatcaacgttattttatcaaacaaattaaacaactagaagcacataaaggcgacttaatggcgttgccgattccggaacgcttaacgaagttacggtcgttacatttgacgggcgaaagtttgcaaaactttgatcgttgggaaaaacaatatgagcagattaccaaccataacttcagcacgattgaaggctatctttttgatgcggaaacggccaatgccaaataccaattcattcaggttgcacggattctcaaacaattgcgggcgtacttgactgaaacggatcaagatttactggatgttcaagatgctttagaaaatctacttgccaatgaagccgatacacgtcaaaaaattcagcgtctacgagaacaatatcaacaactacgtaaacgtttgttgactaagagtttttcgtttggacctgcattagatgcgcttgaagcaacgctaggtcgcttagaggtggattttgacgaagccaacgaactaacaacagccggcgaccatctaggggctaaggccattttgcagaaattaattactgaaacaacgcaattagaagaccagatgggacggattccaaagcgctataacgaattagctaacgagtttcccgaacaactggttgaaattaatgatacctaccatcaaatgttaaaagaacattatcaatttgatgatcggcagattgaagtcaaacaacaacaactaatggatcaacttgataagagcactaccttgttaagtgatttggccattgagtcggttgaagccaataacgatgaaattgcacgtggcattgatcaattatatgatcaattagaagctgagatgactgccaagaaggcagtcgcgacgcaattgccaaccaccgcgacattcgtgcaacatgctgaacgtcagaaccatgagctattattggaactcgatcatctcaatcagagttatgcactcacacatggtgagttggcaagcgccaaacaattacaaaagcaaattggtgaagaacaggcgttagttgaagggcaccaagcgaagattgccaaccacgaagcggtttacacggcgattgctgaagatttgaccgggattgacgaacggctaactgtcatcgaagaaaaacaacaagcaattcatgatcaggttgctagtttgcatcaaggcgaagtcgtcgctaatgaaaacttacgccagtttgaacttgaactacgtaacttgaagcgcgctgttgaaaaggttaatttacctggtttacaacagaaatatttggatttcttcttcgttgtttctgatgagattcaaaaacttgatcatgatttgaatcaaattaagattaatttagacgatatcgcgaagcaattaattctcgttcaagaggatttagatgaattgaaggccaagacggataccttaattgacagtgcattgattacggagcaattgttacaatatgccaaccgatatcgtgcagattttcccgccatccaggaagcctgtgtgacggtccaaaccatttttaatgaagaatacgactatgctaaagctgtcgacttattggcaacggcccttgaaaaggttgatccaggtgcttacacacaagttgaaaaggcctattacgaccaaaagtcagacgcaactaattagtcacttagatgctcaccagtccgagacaagacgcattttgtctcggatttgttttgttaaagattaattggttgtctttaataaccaatttgctataatgtacaacgttaaaacactaatttttagtaagaaggatcgatatgatttattttgacaatagtgccaccactaaaatcgcgccaggcgcacttcagacctatcaagcggttagtgaacagttcttcggcaacccctctagtttacatgtgattggggaaaaagcctttcatattttagaacaatcacgccaacaaatcgctgatttattaggcgtagaccacgatgaaatcttctttaccagcggtggaacagaaggcgataactgggtcttaaaaggcacggcaattgaaaaacgggcgtttgggaaacatttaattacgacatcggttgaacatccagccatcattaaatccatgcagcaactggaaaaattaggctttgatgtgacttatctacccgttgatcagtttggtcgaattgatccggctgacttaaaagcagcattgcggcctgataccattttagtttcgatcatggccattaataacgaaatcggaacgtgtcagccacttgaagccattgctgatattttgaaggattatcctaatattcatttccacgttgatgccgttcaagggattggcaaaggcattcaagaggcgattttcaacgaacgcgttgattttgtgaccttatcagggcataaattccacggcccacgggggactgggattttgtataagaaacgcgggcgtcatttagcgccgcttttaaccggtgggggccaagagcatgatttacgttctggaaccgaaaatgtgccagccatcgcggcaatggccaaagccttacgtttgttattgaccgatgagactgaaaaagtacaccgccaagcagctattcgagaacgactctttaaccatgtcagtcaatcggataaaacggttatgttttcacaactgacgcctgattttgcgccgcatattttgtgcttcgcaattaaaggtgttcgcggtgaaacaacggttcatgcgtttgaagaacacgaaatctatatttcaacgacaagtgcttgctcttcgaagaaagggactgaatctagtaccttaaaggcaatgcacgtcaatgaaaaaattgcgacaagcgccattcgggtatccctcgatgaatacaatacgctagaagaagcggatgcattcatcaaagcattcgatcaaattaacgaacgcttcaaaaaaattaattcgtaaactaccatctaaaaggagataggcatgcaatacactgaaattatggttcgctacggcgaactttcgacaaagggtaaaaaccggaacgattttatcggtcggttaaacgggaacgtcacaaaggcgcttcacgagtataaacaactccggattcaccctaaacgtgaccggatgcatatcgttttaaacggcgacgatgcagaaggcgttatcgaacgtctccgtcacgtcttcggcatccaaaacttctcaccaagtatccaagttgatcgtgatttagattctgttaaagaaatggcgcttgccatgatgaaagaaatcggcaaacctgggatgtctttcaaagttaacacacgtcgttctgatcacaatttcttcttggatacgaatgatatgaaccgcgaattaggtggttacttatcagatgaattacctgaattagaagtgcaaatgaaaaaacctgacattactttgcgggttgaaattcgccaagatgcgatttacttaaccaaccaagtgattcaaggggctggtggcttaccagtcggttctgccggtaaaggaatgttgatgttatctggtgggattgattcaccagtagcaggttacttaacgctcaaacggggtgtcgacattgaaatggtgcatttctttagcccaccatacacaagcgacaatgccttgaataaggccaaagaattaacggcgaaattggtgccatacgttggtgggattaagtttatcgaagtcccattcacggaaattcaagaagaagtgaagcattctgtgccagaaggttacttaatgaccattcaacggcggatgatgttgcgtttaacggatcaaatccgtgctaagcgccaaggtttagccatttttaatggggaatctgtcggtcaagtggcctcacaaacacttgaaagtatgatggctatcaatgatgtcacaacaacgccaatcgtgcggccagttgcgacaatggataagaatgaaatcattgaaattgcgaaggatattgatacgtacgaattatcaatcatgccattcgaagattgctgtaccatttttgcaccaccagcaccgaagacccggcctaacttagataagacccggttctacgaacaacgcatcgatgtggatgccttgattgaacgctcaattgctggaattagagtgacagaaatcaaagctggcgatcaattcttaaatcaagacgaagaaatcattgctgaactattgtaaactataaaaatcctgagaataacagtatgttgttctcaggatttttttggggagaagattcgggatttattttcagaatgaacgccggtgacgcttgacctttggcgttcactcagctaaactattaacaacgcgttgaacaagagcgattaagattgggctagtttagagagaagatgcatggctgagacgtcttccaatgaccaattaatcggtagcttgtgagctgttaacctgaaattaagtagggctaaccggacaatttcgttcgttaacaaatcatgagttggggactagtctagtcctaatttaggtggtaccgcgaaaaagcattcgtcctattgtgaggaatgcttttttgtttgccattaaacgcaatattttaaaggagtgaacaagatgactgatcacaaagaaatgtcaaccaaatatgatccaaatcaagttgaagccggtcgttatcaagattggttagatgctgatttattcaagccaaatgccaatccagatgccaaaccttattcaatcgttattccaccgccaaatgttacgggtaaactccatttaggccatgcctgggatacgaccttacaagatatgttaatccggcaaaaacggatgcaagggtatgatgtactctggttgccagggatggatcatgccgggattgcaactcaagctaaagtggaagcaaaattagctgaacaagggatttcacgttatgacttaggtcgtgaaaaattcatcgaacaagtctgggactggaaagatgaatatgccgcaaccatccacgcacaatgggctaagatgggcttatcacttgattattcacgtgaacggttcacattagacgatggcttatcagacgctgttcgtaaagtctttgttaccttatacaacaagggcttaatctatcgtggcgaatacatcatcaattgggatccaaaagcacggacggctttatcagatatcgaagtgttgcatcaagatgatgaaggggccttctatcatgttaactatccattgacggatggttctgggagcatcgaaattgccacaacacgtcctgaaacattacctggtgatactgctatcgctgtacatccagatgatgaacggtatgcggaccttgttggcaagacggtcacattaccattaatgaatcgtgaaattccgattatcgctgatcactatgtcgataaggatttcggtactggtgctttgaagattacaccagcacacgaccctaacgattttgaagtcggtaatcggcatgacttaccacggatcaatgtcatgaacgaagatgccagcatgaatgaaagtgccggcaagtataacggcatggatcgttttgaagcacgtaaagcgattgttgctgacttgaaggaacaaggttatttgattaaagtcgacccaatgacacatagtgttggtcattctgaacggactggtgtacaagttgaagcccggctttcaacgcaatggtttgttaagatgaagccacttgctgaaatggctttgaagaaccaagcaaccgatcaaaaggtgaactttgtgccagaacgattcgaaaataccttcacacaatggatggaaaacgttcatgattgggttatttcgcgtcaattatggtgggggcatcaaatcccaacttggtaccataaacaaactggtgaaatgtatgtcggcgaagaagcaccaaaagatatcgaaaactggactcaagattctgatgtcctagacacatggttcagtagtgccttatggccattttcaacaatgggttggccaaacactgaagcgcctgacttcaaacgctacttcccaaccaatacgttggtaactggctacgatatcatcttcttctgggtctcacggatgattttccaaagtctcgaatttacagaacaacgcccattcgaacacgtcctcattcacggtttaatccgcgatgaacaaggccgtaagatgagtaaatcacttggtaatgggattgacccaatggaagtcattgaaaaatacggtgccgatgcattgcgttggttcttaacgagtggctcaacaccaggccaagatgttcgtttcagttacacgaagatggatgctgcctggaacttcatcaataagatttggaacgcaagtcgtttcgtcatcatgaaccttgaagacacaccagcgccaacgaagatgccagatgccgctaaccttgatttaacggacaaatggatcttaagccaattgaaccaaacggtggcagatgttacacggctttatgaaagcttcgaatttggtgaagcgggccggacattgtataactttatctggaacgatttctgtgactggtatattgaaatggcgaaggaagtcctttacggagacgaccaagcagccattgccaataaacgttataacttggcttatgttttagaccaaacattgcgtctattacacccagtgatgccatttgtcacggaagaaatctggcaaagtatgccacatactggcaattcaatcgtcaatgcggcttatccagaagtgcacgctgaattagacgatccagaagcaacaacgcaaatgaacgcgttaatcgatctaattagaagtgtccggaatatccgttccgaagccaatgcaccactaagcaagccaattgatgtcttggtcaacattcaagatgcgccattaatgaggatcttcaaacaaaaccaagacttcatcgaacgcttcgtacatcctaagtcacttgaaattgctgaaggtctaacagcaccagcattggcgaagacagccattatcagtggtgcagaagtttatgtgccattggctgaattgctcgacttagacgaagaaatcgcccgtttagaaggcgaattgaaacgtttagacggtgaaatcaaacgtgctaaaggcaagttgtcaaacaagggcttcacagaccgcgcaccagaaaaagtggtccaagaagaacgcgacaaacaagcagactacgaacaacaataccaatcagtcgaaaaacgagtagcagaattaaaaaatgcataagtgcatcatcaacggttagcttctgagcatttgcctaacttagcgaattggcgctgtaagcgccgatttgataagtgtagcaaagcacaggaagctgttgatgaaaacacgttaaaaaagaagtgcgactcgagctggttaggctttgaggattaacagtaaaatgggcattgtggcgttttttgccatgatgcccattttgcagttaaccggaaaaggctgctcgaggagcacgttagtgaaagaagtgtgattggttgcgggtagcaactgagcatcaatacaaaaattccgttaattcaggttttaggattaacggaatttttagattaagcggaagttgttgcaaccaaaagcacgttaaggccaccttaaaaactgaggtggtctttttgtgtgcgccagtttttaagcatcgattcgcgtgcaatctatgctaaaatagagacagtttgttaaaggagattggcgatgttagtgacagattacgaaacagctttggcgtatattcattcgcgccccagattacataaagaagcgaacctgaaccgaatgacgcaattgttggcaggtctcggtaatccgcaagaaaaccaacaattcattcatgtgactggcactaatggcaagggatccgttgtcaaaatggtcagttgtttgattgaagagttaggtttaaaagtcggtcgttacacatcgccgtttattatgcggttcaacgagcgaattgctatcaatcaggaaccaatcagtgatgccgatttagtaactgttacgcaacaaattcagacaacggttgcccagattcaaacaactgaccccgaatttgaggtgaccgagtttgaatggatcacagcaatgatgtttctatatttcaaacaacagcaggttgatgtcgccgttgtggaagtcggaattggcggtttgtatgactcgactaatgtgttgacgccgctgatatcagttattacgtcgattggtcttgatcatcaggctctattaggcaagacatttgcagaaattgcgactcaaaaagccgggatcattaaggctggtcatccagtcgtgattggtcaattaccaaaagaagcactgacggtggttgaggaaacggcaactcgtttgaatagttcgttagccattagtggctgtgatttttcgagtgctgcggtcaaaacgttacctacttgggggcaacagttaactttccaaaatgacgcggtaacgtatcgacaattacagattccgctgatgggggattatcaaattgaaaacgccgcggttgcattacaagtattttggtgttacttacagttgacgcaacaaaaactagaggttcgagacatcaaacgtgctttaaaacgggttaactggcctgggcgcttcgaaaaaatcaacgatgagccgttaattatcttggatggtgcacataatccggaaggggtggcgcaattggttcagacaacgcggcatcaatttaaaaatcgtgacatttacctgttattcggagcgcttggtgataaaaatctagatgagatgttaccacagctcaaaaaaatagcgacgcggatggtgctgactacggttcctgataatccacgcgcggcaacagcggcccaatatgcagcagttgatgagacgattacatttgaaccggactggccggttgcattaaccgaattattagcggatgtgtcggctgatgatgtattactcgtaacgggttcgctatatttaattagtacgattcgccaatattttaaaggagaatagtcaatgacaactagaggaattatttttgatatggacggtctattggttgattcggagaagatttattaccaagccaatattcgggccgctaaagaaatgggctttgattttacacctgaagatcaccatgccatcttagggaccactgatacgtatttacgcaattattttaaagcgaagctgggttcggcaacggccgcaacagaatttattgatcgttcataccgtaacgtagcaacggttgttgaagcagatggtgttgcaattaagccagggttagtcgatttactagattactgtgataatcaggggattagtcgggtgattgcatcgagcaatttccgcagcatggtcgatgactttatgcaaagtactggcctacaatcacggtttagtcaaattgttgcgggagacgaagtgactcacggcaaaccgaaccccgaaatctttttaaaagcgttggatagattagccttaccagcgcctagtgccctagtattagaagactcacctaatggtgtgatggccgctagtaaagctgccattccggtgattatggtccctgatttaattgaaccaactgcgataaccaatcagcaaacacttgcgaccgttggggatttggctcaagtgattccgtatttagaaaaataagcccgttaattaacgtattgttagttaaaccaagaagacgcgtcatgcgtctttttttgtgggaggcaaacaatggcggggaatacaggacaattacaaccaagagaacaattaatgcagtacggcgcagcaagtttatcgaacgagcaattggcaatcgtcattttgcgttctggtaatagtcacctatctgttggtgaggtggcgcgcaaattgctagcgcattatcctgactttcgggatttagaacaagcaagtttaacgcagttggaaacactggcaggaattggaccagtcaaagcgattgaaatccaagccatctgtgaattgagtcaccgattgcaaacgcaacgaactctccggtttggtgtggtcgcatcgagccaaatggttggccgtcgcatgattgaaacactagcgggcgaaacgcaagaacaactgctagctgtttttttagacgttaaaaatcaaattattcagatgaaacagatttatattggcacactcgatagttcagttgcgcatccgcgggaagtctttaaattagcggtccgttattctgcagcaaaatttattttggtgcataatcatccaagcggccagttgacgccgtcaacgcaagatattgccttcactaaacgaattgtcgcctgtggtgaactgatgggcattgtatgcctagaccacttgattattggaagccagcagtatctcagtttgcgagaagagggttacttagtggagtaaaagagaacgcttttttctttaagaatctgttaattttaggcgagacctgtcaaattttctgaaaatccgttaacatagtagttacattgcgttttttattacgtaaaattatgatataatgccaatgactataaaaacgtttggtaactgaaggagagaaaaatagtgttcggattagggactagaaatatcggtattgacttaggtaccgcaaacacactcgtatacatggacggtaaagacattgtcttgagagaaccctctgttgtcgctaaaaatacacaaactggtgacgtgattgctgttggctcagaagcccgcgacatgattggccggacacctggtagtattgtggcaattcgcccaatgaaagatggcgtgatcgcagattacgatacaactgctgccatgcttaaatattttatcgaaaaatcattaggtcgctcatctagcaagccatttgtaatggtctgcgtaccaagtggtgtgactgaagttgaaaaacgtgctgtaatcgatgcaactaaggtggcaggcgctcgtgatgcatacgtcattgaagaaccatttgcagctgcaattggtgccggtcttcctgtgatggatccaactggtagcatggtcgttgatatcggtggcgggacaacagacgttgccacaatctcattaggtgggattgtttcaagccgttcaattcgaatggctggcgacaagttagatgacgcgatcatttcttacatccgtcaaaacaataacttgttgattggtgaaagaacagccgaacaaatcaaattccaaatcgcttcagcatcaccagaacgcgctaaggaaattgaagcgatgagcattcgtggtcgcgatttagtaactgggctacctaagacagtggacattcaagctgttgatattgctgaagccatcaaagaagttgtcacagccattatcgaagccatcaaagaaacacttgaagaaacatcaccagaaattgcagccgacgtgattgatcacgggattgtcttaactggtggcggcgcattgttgaaacacttaccagaagtgatttcagatgctactaaagtgccagtctttatcgctcaagatcctttagactgtgttgcagtcggaactggcgaatcattaaagaatatcgatgttatgaagaaaaattaatcgttcagtagaagtgggacaagaagcggtcagcgttgacgtagcgcctaaattagtgacagattcgggttgtgaatcgattgctataggaaggactactgatcaccggtttttgtcccacctttacgatattaaggatggatggtggcgaagaaaccatgcaaaagtttttttcaaataagaagttaattgtgttattaatcatgctaatcgtctgcatgggcttcatcgcaatgtcagttggtttacgcaataacaaaaagagtccgagtttcgtacgccaatttggcaacgacgtaacgggcatcactaaccaagtcattagcgtgccggccaatgggattggtcgaggggtagatgccttaacagacttgattaatacgtaccaggaaaacaaagaacttaaagcacaacttgatgatttagctcaaaccaaggttcaaacccaaaccctcaaagaagaaaatgcaagtttgaaaaaggaactcggcttaaaaggcaccttgacggattatacaaccgttaatgcgtctgttttatcccggaatcctgataattggcaaaatgcattggttatcaataaaggggccttagctggacttaaaaaagatatgcccgtcatgtctgagtctgggattattggacggattgttgaagtcaacaagactaattcgaaggttgaactcgtttcaagtacggatcaaagtagtaacggatttgctgctgtggtgaataccaaagatggtaagcaagttaatgggatcatgtccggttacaatgctgaccggaaacaattgaagctcgggcagattaagaccgatgcggcaatcgaaaaaggtgacaaagtaatcacgtctggtttaggtggattaacccctaaaggcttgtaccttggtaaggtagcagcagttaagaaagacgattttgggttagcattaactgtttatgtgaccccagctgctgatttaaacaacttaaccgttgtgactgtcatcaaacgaacgattgaaggtgagtagcatgggtgtgacgcgattacaacggcgctatttattaccaatctacttactcgttgcgttttatttggatggcgccatcagtcatttatgtgaacaatggttatatacaccagatcatacgttgattagccggctatttatgctcgtgttagtggtaacggcctttgttttaccagaggaacgccaacttacgtggtatgcagcagggattggtcttttatacgatttgtattatacggggatgatcgggatgtacacttttgcggtgccgctcattatctatacagtgcgttatttaaaacaatatttacctgactcagcctttttcattgggctaatcgatgtcttgtgtttaacattactcgagagtacgatttacatcatgaatcgcttgattggttatgcaacagtaacaccagtcgaatttattagtaatgttttagcaccgacaattgcattaaatttggtttattttgtctttttgtatttgcctttaaaatatttattgctaaaattaaaatcagaacggtaaggggtttgatttttctatggatgcagtcacgttacgaggacgcaaagaaggttttgaattaaacattgatgcgggtgcggatttcgatcaagcattagttgcactagcggaattattgaataagattcgcttagagcaaccgcagttggggagcaatcagattgaactggagctgaccactggtagacgcttgttgaatgatgcgcaaaagcaagcactggcgaccgtctttgagcagtttccagaatttaatgtgacaagcattcaatcggaagtcatgacgattgaacaggctgagattgatcggcgggaaaatagtattcacgttgaacccaatgttttacgaagcggccaagaggtcaattatgttggcgatgtcttattcgtcggtaatttacaccaaggcgcaatgttaaaagcaacgggcagtatcttcgtacttggtgaagttgccgggattgtgcacgctggttttccagataatgcagaagcagttgttgcaggtgatttatcacacgcgttacaattgcggatagcagacgcagttgagattctcgatcaccagaagacgccatttacggcacagagtgtaagtttcatcaatgatttacatgttatcgactacggtgagttaacggatttgaaacagattaatccaaaattatatcgtaaaatgaaggagcaataaaaatgggaacagctttggttattacatccggtaaaggcggcgttggtaaaacaacatcaagcgccaatattgggacggcgcttgcgcttttagataagaaggtttgcttgttagatttagacattggtctgcgtaatttagatgttgtcttaggattgagcaaccgcattatttatgatatcgtggatgtcgcccaaggccgtgctaagttgcaccaagcactgattaaagataaacgttttgatgaaaaaatttacttattgccagccgctcaaaatgcggataaagaagcgttaacgcctgatgaagtcaccgccatcgtgaatgaattaaaagaagaattcgattttgtgattcttgattgtcctgctgggattgaatctggctttaaaaatgcgattgccggtgcagacggtgcaattgtggttgcaactcccgaaatttcttctgttagtgatgctgaccgcgttgtcggcttgctagaagaagaagaaatgcggattgcgccacgcttagtaattaaccggattcggcgtcatatgatgaatgaaggcgaaacgatggatgttgatgaaattaccaaacatctttcaatttcattgttaggcattatttttgatgatgatgcggttatcaagacgtccaatgccggcgaaccaattgtgatggatccgaaaaacccagcaagccaaggctatcggaatattgcccgtcgtttactaggcgaaacagttccattgatgactttgaaacaacacaaggttggtttctgggcccgtcttttcggtaagcaataaacattaaccattgacttttgatgcgatattgaatagaatgaataacaatacattaaacgttgaacggtccaaattaattcttgaggttcagagagctgatgcgtggtggaagtcggcccttgagattaatggcacaaccgtgagtttgatcatcgaataaagatgatccgttagcccgttatcgctgtagttttagaaactacataagtttaagctgcgtgagcagtttattaaactgaggtggcaccgcgataaattcgtcctcttggagaaatccaggggacttttttattggtctaaaactaactgagttgtttgttgtgaggcaaacaaaaatttgaggtggcaccgcgaaatttagccctctttgtgttttaaacgcaaagagggctttttattttggacaaatgagaggagtctgtcatgattgactatagtttatcgattttaccagcattattaagtggggcgcagatgacgttggctgtttttggcctaacgattattggcgcgattccacttggtttattattaagtttagggttattagctaagtttaaaccactgcattatcttttagatttatatgtgtggctgatgcgtgggacaccgttattattacaactaatttttgtattttatggtttacccgtggtcggaattgtttttaaccggttcgatgctgctttaatcgcttttattttgaattatgctgcatattttgccgaaattttccgaggcggctttcaagccgttgataatggtcagatcgaagcagctgaggtcttaggcttaacttacccacaaacaatcgctaaaattatcgtgtcccaaacggttaaaattgtcttaccgtctgtcggtaacgaagtgatcaacttgattaaagattcatcgttagtgtatgttatcggcattggggatttactgcgggctggcaatgtcgcaagtgcgcgtgatgtcaatctcttaccacttttgctagtcgggattatttatttattgttaacagccatttgtacatgggcattacggcgtttggaacgctattatcgttattatcgctaaggaggcggcaacatgtttcaattagaaaatatcaatcaatccttcaaaggtcggcaaattttgaacgacttaaatttattagttgaatcagggagtattttagcgattgtcggtccaagtggtgctggcaaatcaactttattacggttaatgagtgggcttgatcaacccgatagcggacggtttattattgatggtaaaccttacgaacctagtaatcgggaacaaggggcgcgcattggcgttgtcttccaagattttcggttattcccacatctctctgtccttgagaatgtgacgctggcacccatcatggtcaaaaaacaacccgctaaaaaggctaaagcagatggcgcagaattattacagcaactagggttaagtgctcaggcgacggcttatccgttccaactatcaggcggtcaacgtcaacgagtcgcaattgcccgcgcattggcgatgcaaccggagattctctgttatgacgaaccaaccagtgcacttgatccatcgttagtggcaagtgtcgcacaactcattttagatttgaaacagcagggaatgacacaaattgttgtcacccatgatattcaatttgccaaccagattgctgatcaaatctttgaattacaaccaaacggggttcaacaaaatgatgaagcttaaaaaaacagcattaatagcggctttattgatgagcatgattggtttagcagggtgcgcacaacgcaatcagcaggctgatcaatgggcaacgattcaaaaacgccaaaaaatagtcgtcgggattgatgatagttttgtgccaatgacttaccgtgagaagaatggtcaattaaccggttttgatgttgatttggcacgggcgatttttaaggggagtggcattcgggttgactttcagtcgattgattgggatatgaaagaaacggaattgaataatcaaacgattgatttaatttggagtggttattctaaaacggcgcaacgggcaaaacgggttgcgtttagtgacccgtatctgactaatcggcaaatgattgtgtcgctcaagaaacaccctgttaatcaaatggctgatttaaccaaccaaccattaggcgttcaaacgggctcatctgggatggaacaactagagcgttatcctaaacgattacagcaaagaattgccaaccatgcaccaatcctatatgatacttataacaatgcgtttatcgacttacaggccgatcggattaaggggctcttaattgatgaagtctacgcgcaatttgaaattaagtcacgccacaatggcagcgattttcaagccatcgacagtccttttgcagcagaacagtttgctgttgggatgcgtccgcaagatcaacaattacgtcaatttatcaaccgacgttatcgggtcttacaagcaaatggtacgctagccaaattaaaagcaaagtggtttaaagaataggatgaatgaagaatgacagcaatcattatctgggggatagcactgatttggattgcaaatacaatcggggctgttaccaccgtatttcgccaacaacgtgatattgcagcaacctgggcctggctcttggtattgattttcttaccaattatcggctttgttttgtatctatttttcggaaaaaaattaccggaagatcatatggtcgatttgaaaacacaagaacggctcggcattgatgccttggtgacctcccaaaaagcagcgttacgccaagcgcagaagcaacacacgttaccgccagaaacgcagagcttaatcaacctcttcttagtatcaaataccgcggttgtgacccaggaaaacaatgtaacaattttaacggatttgaaggcggcgtatcaacagttgttaacggatgtcaatcgggcgcaagatcatatccatcttgaatactatgctttttatgacaacgaacacgggcgtcaactggtcaatctattggcttacaaggcactgcggggggtaaaagtgcgtgtgatgtatgatgcatttgggtcgcaacatttatcccggcagttctttaagccattggaagcagccggcggccaagttgtcccgttttttagttctcggttccggttcgttaatctacgctttaactttcgtaaccaccggcaattggcagtaattgatggcaataccgcctaccttggcgattttaaccagaataatcatcacgttaatattcctgcacgagatacgcggattcggattaccggcgatggtgtgttatcgtttcaagctcgctttttcatggactggaatgcggctacgcgtcaggaaaaggtgtattacagtccgcaatattttcctaactcagatgaacacgggcagactagcatgcaactggtatcaagtggacctgatcgagaactcgatgagattaagttaggctttttgaagatgattgctgccgctaaaaaacggctgtggattcagaccccatattttattccggatgattctgtattggcggcgttagtgttagccattaattctggggtgactgtgaagatcatgatggccaaacgtgcaaaacataaaatgattcatcatgcgagtttgtattacgctagacaaatcgtgaaggcgggcggtcagatttacttctctgaatcaaccggatttaaatcacgcgtaatgttagttgatgggcaactagcagcggttgggacggctaatttagatattcgcagttttagattgaattttgaaacgaccgcttttttatatgatgcacaactcgcaactgaacttgaacaatcttttacggctgatttaaaagactgcttaccatttacgaaacaacggatacaagagcaaagcaatcaagaacgttggtcacaggacttagcgcgtttgtttgccccaattatgtaaaaaagaaccgtcagatttaatctgacagttcttttttagttatttgaaatagtcggttaagccggtataaacggcatcagcgactttagcttggtaattagcactgctaatataactaaagtctttatcagaattgatgtagccaagttctaagagaacagcaggccgttgattatcgcgaaggacttgataattgccgtattcaatgccgcgattgttaagcggtaatgtcttagtctgattgttgatggccttcgcgaggctcatatccttactgcttgaatagtagtaggttgttgtcccggatgcttcattggcttcattgcttgaatcaaaatgaacgctgataaaggcatcagcctttaatttattggcaagagcaggtcgcggttcgagatcgacaaaactatcgtttgaacgcgttagcacgacgttagcaccagccgcttttaattttttagcaatcgcatcgacggtcgctaatgtgtagtctttttcatacttagacttagttgaaagtgcaccgacgtcggtgccaccatgaccagcatctaaaacaatggtggcttcagaaagggaagtagcgctagtcttaacaacttcattcttctcagaaggagtgacaacccaacttgcgacgtaaccggtattaccatcggcatctttaacttgataccaagtaccactcttattgatataagttagcttggtattggccgggtagctttgggtatattgatacgaaacatcaggaccagtgcgtagcttggtattatccagttgggttgtcactgatttaatcgcggagctacttgtatcagtatccgtagactcagattcagcggttgtcattttttgaacagtcgccggagcttggtcggaaacttcgattaaatcactttgtacccaaccaactgctgagttgtatttaatctggctccaaccgttttgttggtataagactgtaatttcgtcaccttgatttaacttaccgagtagttgactatcggcactactgctttggcggacattggcaaaactgttggtgaccttagcgactcggtttgaagtggcactgacttcggtgttatcgactaaccagctagcaacccagccaatcttatcaccacttaagcgcacttggtaccaattattcttttgtgagataacattcattgtttcgcctttattggcttgactcatgacatcataagataatccagggccttggcgaatgtttacgacgttcgctttaatcgtaatttgttggtaagcagccagcgcgtgggtcacaaagagaccgacaaaaacgagtaatgctaatataataacggccggatagtgtttaaaccagctcaaaggtttctgcatttttttcaacacctttgttatgttttattaatttataaggttaattatagcaaaaaactcaactttctaaagagtttcagcgaaaaagttacaaaaaattcaagattgattgacttttttttgaaataacgttaatcttataacaataagaataagtgatgaccagtgataaagtaaaggctaagccccctacgacagagatgatttcacagctgcaagaaatcaatggcacgccgagactgcttttgaggtctgtgtggtcgcacaccgttggcaacaacgttatataattaagctaaaattaaggtggtaccgtgcatttaagcacccttgttcaacgacaggggtgtttttttatttggtatccatttggaggaatgatcatgggctatcaaaagccaaaaggaactgcggatattttacctggagattcaaaccagtggcaattagtggagaaaacggcacgcgacgtttttgcccgctatcaattcaacgaaattagaacaccattatttgaaagctatgatgtcttttcacggagttcaggcgatacatctgatattgtcagcaaagaaatgtatgatttcatggataaaggggatcggcatatcgcgctgcgtccagagggcacagctggagttgtacgggcgttcgtagaaaataaactttatgggccagaacatcaaaaaccttataaggtgtattacatgggaccaatgttccgttatgaacggccacaatcaggccggcaacgccagttccatcaaattggggtcgaagcatttggttctgagagtccagcggtcgatattgaagtcattagcatggcgatgcgtttattacgtgaatgccatattacggatttaaaactggccatcaataccttaggggatgcggaaagtcgcgcggcttatcatgaagcccttgtcagctatcttgaaccacattttgatgaattaagtgacgattctaaagttcgtctacacaagaacccattgcgcgtcttagatagtaaagatgctaaggaccaagaaattgtgaaggatgcacctgttattttggattacttaacaccagaagcaacggcgcactttgaaacggttaagcacttacttgaaacattgcacattccatatgaagtggatactgaaatggtgcgcggactcgattattacaatcacacaatttttgaaattatgacaaataataaggtgcttggtcgcggctacacaaccgtcttagccggtggccgttataatgggttagttgaacaacttggtggcccggacatgccaggggttggttttggcttaggcgttgaacgattattattattgatgaatgcgcaaaacgaagcgttggttccagaatctaaactcgatgtgtatgtcgttggaattggcgctgaaacaagtgcgacaactctccaaatcgttgaaaagattcgtgatacaggtttaaccgctgatcgagactatcttgatcgtaaaccaaaagcgcaatttaaaacagctaataagttaaacgcccaaatggtgattacaatcggtgaatcagaattagctgatcaaacagcacatgttaaagacatgactagtggtgttgaaattacggtaccacttgctgaagtctatgctgactttaaagcagtgcaacaacagttaaatcaaaattaacgcatataagatgcctcaaaagtaaatttgaggcatcttttttatttgatggcagtcaattcactttaatcctcaggaaatcctagactgctagaacactctaaatgtgttctgacagccatttccctccggttaattcgaagtgccaaacaagcgctgtgcgcttattcgtcccttcgctttaatcctcaggaaatcccagactgtcagaacactctgagcatatttgtcgctatctgtttgtatctgcttataataataaacacgaaggagtgatggatatgacagatgatttagaacaacggttaacgacagaacaatatgcggtaacccaacaaaatgcgacggaggccccatttaccggcgagtatgatgattttgatgaacaaggcatctacgtggatgttgtcagtcatgaaccattatttagttcgttagataaatatgatgcaggctgtggttggccctcatttacaaagccaattgcgcctttgacggaacgccgggaccaatcttatgggatggaacgcgttgaagtccgtagtgaagaagctaattcgcatttagggcacgtttttaatgatggaccgcaagaagctggtggattacgctattgcatcaactcagcagctttaaaatttattccagtcgaacaactcgaaaatgaaggttacggtcaatatctaagcttatttgaagagggggcacaataatggcaactgatacagcaatttttgccggtgggtgtttttggtgcatggttcatccgtttgatcagcaaccggggattatcaaggttgtttctggttataccggtgggcatgttcctaatccaacttatgaggaagtttgctcgcatacgacggggcacactgaagcagttgaaattacatttgatcccgcgattatttcttatgcggaattagttgaaatttattggcgccaaacagatccaaccgatgccatggggcagttccaagatcgtggcgatagttaccggccggtgattttcgttaactcgcctgagcaacgtgcaatcgcggaagcttccaaacaagcattaatcgatagtggtcgcttcaacgaaccgattgtcacgcaaattgaggctgccaaaccgttctatccagccgaagaatatcaccaagatttctataaaaaagaaccatttagagcagaattggtcgaggggacacgccgtgctttcattcgtgaaaattgggcgcattaattccaagaaatcctttagtattcacaaatggtatgctagaatgaaagacatcaaaagtggataggtgtgatattcaagtggacgatttagctcggaaacatcaaaatatggcgaagatttcggcagccattttatacggaatttgtgtgtcgattgcattgaactttttctgggaagaaggtggcatttacgcctctgggattaccgggttcgcgcaattcattcatacagtgacgtcgaaatttatgccgtttctaccatttccattatcaacgtcattgatgttattcgtgttaaatgtgccattatttattcttgcgtggttcaaaattggccaccatttcaccatttatacgtttattgcagttgttttttcaagtgttatggtacagattatgccctttacacagctaacggctaatccgattatctgtgcgatttttggggcggtaattaacggttttgggaccgggatggccttgaaaaacgatatttccactggtggcttagatatcattgggattgtactgcgcaaaaaaaccggccgttcagtcggttcaatcaatatcatgtttaatgtggcgctcgtttttgccgctgggttcctctttggttgggaacatgcgctctatagtatcttgagtatttttgtcaacggcaaagtcatcgatatggtttatacgcgccaacaaaaactgcaagtgatgattattaccgataagtccaaagttgtgattcaaatgattcaagacgaaatgcggcgtgggattacgattgtccacgacgtagaaggggcatataaccgtgaagaaaagacgatgttatttaccgttatttctcgctttgaaatgcatgatttagaaatggtcatgaaacaagcggatgaccacgcattcgtcagcatgacggaagctgtcaaaattctcgggcatttctatgaacctaagattaaataagataacccgccattcaattgaatggcgggctttttttatgggttaggtttcgtcttgctttttgttgcgctttctgtgacaatctaggtaatcaaaatgcatggaggtagtggaatgttattagggagtcacgttagtatgaagggcaagcagatgttactagggtcagcggagagtgcagttgattttggtgcaaatgccttcatgatatataccggcgcgccacaaaatacgcgccgcaaaccaatcgaagaattaaatattgaagcagcaaaaccctatattgaagctcacaacttaggtccaattgttgttcatgcaccatacatcgttaatttagggaatacagtgaagcctgagaacttcaagtttgcggtctcttttttacaagaagaagtgttacgcgctgaagcattaggggccactcaaatcgtcttgcatccaggtgcacacgttggggcgggtgcagatgctggtattcaacaaattatcaaaggattaaacgaaattttacgacctgatcaaaccgcccaaattgccttagaaaccatggcaggtaaaggaaccgaagtcgggcggtcatttaaagaacttgcacagatgatcgatggcgtgacttacaatgaaaagttatcagtgacgtttgatacttgtcatacaaatgatgccggatataatgtgcgtgaagattttgacggcgttttgaatgaattcgatcacattatcggtttggaccgcttaaaagttgttcatttaaacgattctaagaacccacaaggcgcacacaaagatcgtcatgccaatattggttttggtgaaatcggatttgatgcgctaaaccatgtcttacagcatgaacaactcgttaatgtgcctaaaattctagaaaccccatatgttggcgaagataagaagcataactttgcaccatatgcgtatgaaattgcgatgctcaaagcggggcaattcgaccctgatttattaacgaaggttgagcagaacgaaggcaaactatgaatttaaaacgaactaagtttggtatttttatcttaatagcggcgttttggacctttatttttagccagccagtccaggctgccgatacctatgacatcagtcgttatcaggtaaacgttgatgtacaacctgatgggagtgctcaggtcgaacaaaaaacggtgtttgatatccaagatgatatccatggggtctatatcaaccagaatctccaaacaaacgttggtcaaccaaagaagttggttaacccgcaagtcgcagttaatggtcatccgtttagtcaaagtgaatcaggtactgaaggcacctatagcttaactgatgcacaacaaaattatcggttcaaactataccaaactgcacaagatggcaatcaattagcggttactttgaaatatcagttacaaaatctgattattaattatcgtgatacggcggaattgaattggaaagtgattggcgatgcgtgggatagtgacttacaaaacgttcaagtggtaatacaattacctaccacattcaaaaaagcagaccttaaatcatggacgcacggcaatttagatgggcaacaagtcgttgaacccgataaaggccgggttacaattaaactcgctaataatccagcaaaccaatttgtcgaaagccatattatttttccaacggcggtgactgcggcgaatccgaatcggattgatcaatcacgtcgggcagccattatcaaacaagaagcgcgtttggcgcaacaagctaatcaagaacgcaaagcacaaaaacgccgttattggcttttatctataggagcagtggtcttagcgcccggcatgttcttgttaattttacgtaaaattcgaaaaacgcttcctgtgatgacttatactggacaggcaccagaacacgtctatgatttgccagatgaaaatgggcctgcggttgtgcgtcagttgttggcattaccaattacggagacagcaggggcggagagcttatccgcaacgattctagacttagttgctcgaaagaatctaacaattgatgttcaggaaccaaagaaggaactattccataaaaaaacgccgcaattttcattaacgctcgtcaatcgcaatcagttatcacattcagaaaagaagttagttagctggctatttgatgtgattggtgatgggcagcatgtcagtctatttgagattgagaaatatccaaaacggcatagtgcaaaactgttcaatcaacattaccatgggtggcaaacagcagtggcgactgaagcaagtcgtagcgggtggttacgagaacacatcgctgagttaatgaccagtttgaattattggttaatcggccttggcgccctatttttaattttgatttttggtgctttgattggcttagttgcttggtggacgctcattccgatggggcttgtcttcattttaaccgtctggcgtagatttaatttgcaactatggacgcaattgggttacgaaaaacggggcgaatggcaaggctttaaacaaatgctaaaggatatttcgacactcgatatggcgaatgtcccagatgtactattgtgggatcggtatttaagttatgcaacggccttcgggattgctgataaggtcgttaaagctttgaagattcgattgacgccggaacaacttcaaacaatgcctctgggttattattattactacgggtatactggggggttgaacatcggtcaatcctttacaacagctctcaatagtagtgttggcagtgcggtcagtgctgctaatccaacaagtgttagtggtggttctggcggcttttcaggcggctcatcaggcggttttggtggcggttccggtggtgggactttctagtccaatcaaatgattaggtgaaacgccaacacactggtattatgagcgttattaaaatgtaattaacgcgctaaataagtgttagttggaggaggaaagcacatggagtttaacgatgtggttaatcaccgcaaggcaattcggtcatttgacccaaacaaaccgatctcggatgaattaatcgaaaaaataatggtgtccgcccaacgaacaccgtcgtggacgaattcacaaccttggaaagtctatgtagcgacgggtgaaacgttagccgatcatttagaacgaacgggaaaccggatgaaaggctactctgatttaaacgtgattcaccggacagactggggaccgttaatggctgagaacagtcgcgtgtggaatgatgaaatcagtgcctatcttggcgaagacgggttagcgaattttagcgatttacaacgccatctgttcaatgcgcccgtcattatttacttgacggttgagcgcaaagtttcgccatggatgatttatgacatgggggcttttagtcagtcgattctgttagccgcggctaacgaacaagttgatacaattcctgcctatgaaacggccaagtatccagatgcggtccgcaaagcaataggtattccggaaaatgaactgttgattggtgggattgccatggggtaccgtagtgaagggatgattaatgcgtttcattcgcagcgtagttcggttgcgagttttttaacgattaaacattaacctgaataattcatatctttaacagtttttctttctttgcctgttatcatcttgtttgtccgtgatccaaaccaacaccttttaggtgtttaattgcgtatacaaaaagagcacagcctgtgctattgttaagtcgaccaaaaccaacacagaacaggagtgctccatatgtcgactttacaacaacaaaccgttaacttcaacaaaaatctggttctttctaataatggtggtcatttatctaacgatgcgggtctaattttagtggctgaatttatgcatcagatccactttaagcgccttttgaaagaaactctccattttaaggaaaaccgcaagttctataggtaccataagaaccagctgtttaaacaactgttgattcagctgattgcgggttatttcgacgatactgccgctaataaactgaccgcagacatgagctttgagcttgttttagataatttagttgcttcgcaaccaactctttcacgctatatcaaccaaatttccgcagacgacttggccgggatcacaaaattagtcgccaagttagcgcagttagtgatcacacaaaagaagcaacgtcaactgatcattgatcttgattcgactcattccgatacatttggttaccagaaaggcagtgcttttaacacccattatcaaacgaacggttatcatcccctgttggcttttgatggtttttcgggttgtctcttaggagctaaattacggccaggtaacgaatacacttccaaaaatgcggaagcttttttgaaaccgctactgaaacaatacgctgctttagatgtactagtccgggctgactcgggttttgccaagccagaaatttatgccgcctgtgaagaagctggggcaaagtttacgatccgtctcaaggctaatccaaaactacaacggatcgccgagcacttgatccatgtggggcaacctggggaagacttcgccgaaaaagatgtccagtggcaccgtttgacagattaccaaccggacacttggggtcgcgcttaccccgtgatcattaaatcaactcgccctgctggcgagctactctttaaacacgaatttatcgtgactaacttggagctggcttttgccagtgacgtctttgaactctatcaccaacgtggagccatggaggatctgatcaaagaagttaaaagtggctttgcctttgataaaacggatagttccagttttacggctaaccagtttagaatgttactcgccggtgtggcttataacttagttcaagccatgaaaaaactggttttcccagctgaattagggaacgcaacgagcgccactttacgtttcaagctctttcatttggccggcagagtcacccaacatgcacgtaaattatggctgcatctttctagtaccaatgtttttgatgatttatactggcaaacattgtttaggattcaagaatttcagctcactagtaattaaaaaagacaatttaaaaaatttaagtacgatcaagggagtagtttactcttttgacaccaatcaaaaataaaattgtcttaaaaatagctcaaatacactcaaaaatagttgcggattaaatttgagctaaattaaacgttaaaaggggcaaattacctttacgcaacaaagtatgaattattcaggattaacaaattaaaaaagcgttcaaatcgatttcagatttgaacgctttttttaattgacgtgatcgttcgcactgcccgcaaaatcgaggcccatgcgttcaagaataattgtggcagtttcttcgatcgaacggttggcaacattaatcacttggcaaccaatcttatcatacaggtcttgggcgaaagccaattcagctttaatttcgtccatgtctgaataagtggtatcaggatttaacccataagcaatcatccgttcccggcgaatgttattgaggacttctggtgtattcatcaggccgataattttcttaggatcaacccgccagatttcgtctggaatgtgcgcttgtggcacgattggtaagttggcaaccttgatattccgattggctaaaaagagcgacagcggcgtcttagacgttctagaaacaccgagcaacacgatatctgcttctaagaaaccgtgggggtctttaccatcatcgtacataacagcaaattccatcgctgaaatgcgatcaaaataacgatcgttcaaatgatgtagtgccccagcttcaccagttggcgtgctgttggttttagcagtaatcatttgtgtcattggtgacatcatgtcgaaactggcaatttttttcgcttggcaataggtttcggcgatttcagaaagaccgttagtggctaatgtatggaccacaattgtttcttcaggaaccgctttgcttaagacgtccatgagtttctcttgcgtgtgaacgaaggggaagcggacgagatcaggtttaacgtccggaaattgggcgagcgctgcttgtgctaattggagggcggtttggccgactgagtccgaaagcacaaaaacggttaatggtttagattctggcataaggcatgctcctttattcacttttatagcgctatcataccataattatcgaaaaaatcgctagatttgaaaaaatattcaattaattccctgtgggttattgaccgtattttcaacattcgctataatagcaaagaacggttcacgtgaagttaaatttttaacgaacgtaaacggttatacttagcacgcgaggggagggatatcatatgggcaagacagtcgttcgcagtaacgaatctctagatgatgctcttcgtcgcttcaagcgttccgtatcaaaagctggtacaatacaagaatatcgtaaacgtgaattttacgagaaaccaagtgtaaaacgtaagttgaaatcagaagctgcaagaaaacgtaagaagttctaatttcttagataaaggaaatgattgaatgagtttacttgaacaactaagttctgatttgaaaacggcgatgaaggccaaagataagttgcgattagctgttattcggagtttaaagaccgctttaactaacgccaaaattagtgcggggcaagacttatcttctgacgaagaattaagtgtactatcatcacaacttaagcaacgtaaggattcattagctgagtttgaaaagggcgatcgtgcagatctcgctgaacaaacaaaagcagaaattgaaatcgtacaagcttatttaccagagcagctagatgaagcagcagtggtcaccattgttgacgaagcaatgcaggctactggtgcgacaagtaaggctgactttggcaaggtgatgcaatatgtcatgcctaaggtcaaaggacgagctgatggcgctatggtcaatcaagtcgttaaatcaaaattaagttaattttaggcgggacttcctctggggagtcccgcttttttttatggtcgttaattcagattttgataattgaccataaattcgtgaattagcgcggctggctacttttaaaacggttgttgtttgtgatagaatgatggtagttttcattctaaaacaaatgaagttgaaacgtgcggttgcaacttgattcttcactttacgacgtgtagttaataatcgactaaagtcgtttatttgctgggctagataatactcagaatcagttgcagtcacactctggaaggagttatctttgttggctgaaacagatgagcgtttatttcaattggcaacgccaaatttagcggccgctttaatgggcacacacgatacttttttaaaaatcatcgaggaaagcttatctgtcgaactgattgcgtttgacgagcatattaccattcgcggcgaacaaccagcagttgaccaagccgcttctgttttagaaaacttagtggcgctgttacaacatggcattaagctcaatagtagtgatgtggtgagtgcgacgaagatggcccaaaaaggcacgattgctggtttccaagaactttacacggagccattaatcaaggatcgtaaagggcagcatattcgcgtgaagacattcggtcaacgtcaatacgtgaatgcgattcgtcaaaacgatgtcacgtttgggattggccccgccggaacggggaaaacattcttagccgttgtcatggccgttgcggcgttgaaacaaggattagtcgaacggatcattttaacgcgtcctgcggttgaagctggtgagagtttaggttttttaccaggtgatctaaaggaaaaggtggacccttatttacgaccgatttatgatgcattgtatgccgttttgggtaaagaacatactgaacgtttgttagagcgtggtgtcattgagattgcaccgcttgcgtatatgcgtggccgaacactagaagaagctttcgttattttggacgaagcccagaatacaacgcctgctcagatgaagatgttcttaacgcgacttgggtttaactcgaagatgattgtcaacggcgatattagccagattgacttacctaagaaaacaatgagcggcttggtgcaagctgaacatattttgcacgatattcctaagattgctttcgtacagttcagttcagaagatgtggtacggcacccagttgttgctaagattattaacgcctatgcggcgattgaaaagatgagaaagtaggaacacttgaatggatatccaaattatcgatgaaacaaaagtagttgcagaagcaaacgtaaaactggtcacggatattttagaatatgccgggcaacaattagatttacctgaagacacagaaatgtctgtcacgtttgtgacgaacgaacgcattcgccaaattaacaaggaataccgcgatactgaccgtgcgactgatgtcatcagttttgcaatcgaagaagatcctgaagaagaaggattaccagccaactttgaagaactattcgacattcccaagaatatcggtgatttgtttgtttcattagaaaaagcagctgaacaagctgaaacttatggacattcatttgaacgtgaattagggtacacaatggttcacggcttcttacacttaaatggttatgatcacattcatagtgaagatgaagcacaaatgattccattacaggagaagatcctcgatgaatttggattacaacggtaaaaaaccacaaacgggcaagaataaacatttttggcagtcactacgccacgcactcggtggattatggaccgcctttaaaactgaggctaatttacggcgtgatgcctggtttgcactcattgcgattgctttcggtgtttattgtcagttacattatttagattggttagcgattatttctgccatcttcattgtattcattgctgagttttggaatacggtaatggaacacttggttgatttattggttgaccatcagtaccatccactcgctaaaaagattaaagatatcagtgctgcgagtgtcttaatcagcgcaattttagcgctattgattggcgccattgtctttggacacgccatatttaactaaaaggggactattatgtcagaaacatatcgctcaggctttgtggccattgttggccgaccaaatgttggtaaatcaacttttatgaatcgaatgatcggtgagaaaatcgccatcatgtcatcaaaagcacaaacgactcggaacaaaattcaagggatctacacggatgacaatgcacaaatcgtcttcgttgatacaccagggattcataaaccacataacgaattagacgaatacatggatcaagcagcgctttcgacgtttaacgaagtcgatgcgattttattcatgattagtgggattgataaaaaagggcctggggatcaatacatcatggaccaattaaagaacgtcaagaaacccgtttatttggttgttaacaaaattgacgcgatccacccagacgatttattaccaatgattgaacaatatcggcatgaattggacttcaaaggggtttacccaatctctgcattagaaggtaacaatgtccctgaaatgttaaaagaattggaacaaacactcccagaaggcccccaatactatccagaagatcaattaacggatcacccagaatatttcgttgttggtgaattaattcgggaaaaaattcttgaattaacgcatgaagaagtgccccattctgttgccgtggttgtggaacggatgaaagaccgcgtcaatgataagctccagattgaagcgaatatcattgttgaacgtgatggtcaaaaacggattatcatcggtcaaaagggctccattatcaaagaaatcgggattaggtcacgtcgcgaaattgaagctttacttggcgaaaaagtcaacttgaagctctgggttaagattcaaaagaattggcgtgacaataaccaatacctccgtgaatttggttacaataaaaagagattgtaggcttaagcaatggcggaacatcgattcgaagactttaatggtctagtgatgtatcggaagaactataaagaaaaagatatgctggtcaagattttgaccgatcgctttggcaaaaagatgttttacttacgcggtgcgaataaaccgaagtttcgcttgagtgcggctattttgccgtttacccaagctgagtacggtggcgacattcgcgatgatggcttatcctttttaaataatgtcaagtcggcgagtcagtttcaatcgattagcaatgacttgtttttaaatgcctatgcgacctatatcttaggcttagtcgatgttggttttccggatagcgaaccgctcggcagttggtatccgaagattgaacaggcactctcattaatcgatgaaggttttgacgcggcaatgattacgcacatcatcgagattcagatgttacaagtcttcggggtgcagccacaactgcaagtctgtgcggtttgtgggcgttctgatttgccgtttgattattctgagagttatggcgggctgctttgtcaacgccactggcacttggatgttaatcgattccacggtagtcaacgggcgatctattatctgcggttgttttcagtgattgatttattcaagatccaatcggtcaatgtcaaacaaacgacccagatggagcttaagacgatgatcgaccggatttaccaagacacggttggcttgtcgctcaagagtaagcaattcatcgataagatgtacagtttcgatagtcaattaccacaattaaaaaaagtgccgtcagaaattgacagcacgccaaaagacgactaaaatagtaatcaacttaatagacgttgaagaaaagggtcccttaagatggtcagacagtgattctaggtgagtgagaactagaacaagacttgagtggattggcgtttcggagtcataccaatgaagcagcagctcgctttgagctgaagtagggtggaaccgcgagaaatcgtccctatgtgacttaacagtcgcataggctttttttatgcgcaaaatacggaaaagaggaattgaaatggttaaaaagttaaatgtgcaagaaatgattttaaccttacagcgtttttggtctgaaaaaggctgtatgctaatgcaatcttacgatacagaaaaaggggccggcacaatgagcccatacacgttcttacgggcaattggaccagaaccttggaacgccgcttacgtagaaccttcacggcgcccagcagatggtcggtatggcgaaaaccccaaccgtttattccaacatcaccaattccaagtggtcatgaaaccagccccattaaacatccaagaattttacttggatagtttacgggctctaggcatcgatcctttggaacatgacatccgcttcgtcgaagataactgggaaaacccatcaatgggttgtgccggtgttggttgggaagtttggttagacgggatggaagtgacgcaattcacgtacttccaacaagtcggtggtttgcaatgtgatcccgtgacaagtgaaatcacatatggggttgaacgacttgcttcatacatccaagatgtcgacaatgtgttcgaacttgaatggggcaatggcgtgttatatggcgatatttttaaagaacctgaatatgaacattcaaaatatgcttttgaagacagtaaccaagacatgcttttgaaattcttcgatgaatacgaaacagaagcaaaacgtttaattgacttaggccttgttcatccagcatatgactatgtcttgaaatgtagccacacattcaacctattggatgcccatggtgccgtttccgttacagaacgggccggttacttgtcacggattcgccggatggcgcactcaatcgcgcaagcattcgttgctgaacgtgagaaacgtggcttcccgctcttaaaacatgctcaagaatcaaacacggaggtcgttaacaatgactaaaccattcttattagaaattggcttggaagaaatgccagcccacgttgtgatgcccagcatccaacaactagaaaagcgcgtacgcgactttttagaagaacaacacttaacattcgggaccatcaaaacttatgcaacaccacgccggttagccgtcttgattgaagacttagcggacaagcaagctgatattcacgaagaagcgaaaggccccgctaagaaaattgcgcttgatgctgaaggtaactggagtaaagcagcgcaaggttttgttcgcggccaaggtttaacaaccgacgacattacttttaaagcactaaaaggtgttgaatacgtctatgttgaaaaatcaatcatcggcaaacctgttgaaacaatcttgccagaactaaaagccgtgattatggcgatgtctttcccaacacggatgcactgggcagactacgattttgaatatatccgtccaattcactggattgttgctttattagacgatgaaattatggacttcagtattttaaacgttacaactgatcgcacaacacaagggcaccgtttcttaggtcaagcagtaacattggcgaaagcaactgattacgaagcaacgctggaagcacaattcgtaattgcggatgaagctaaacgccaaaacttaattcaaactcagattgaaacaatggcccaagaaaacgattggcaagtcgatttagacgcaaacttgttagaagaagtgacgaacttagttgaatggccaactgctttttatgggcaattcgatcctaagtatcttgaaattccagaagaagtgttgattacctcaatgaaggataaccaacgttacttctacgcacgcagccaagcgggtgatttattacctgttttcatcggtgttcgcaacgggaacaccgacttcatggaaaatgtcattgctgggaacgaaaaagtcctcacagcgcgtttggaagatgccgatttcttctaccatgaagatcaaaaggtaacgattgaacaaaacgttgcgaagttacaaaacgtgtcattccacgacaagattggtagtctggctgaaaagatgacccgtgttggtttaatcgcgcaattcttaggccaaaaatttggtttatcagaagcagaattagttgatttgcaacgggcaagtgatatttataaatttgacttagtgactggcatggtcggtgaatttgccgaattgcaaggggtcatgggtgaaaaatatgccttattacaaggtgaaacaccagccgctgccacagcgattcgcgaacactacatgccaattagtgctgaaggtgcactccctgcaacaaaggtcggcgcggttttagcaatcgctgataagttcgatagtatggctgatttctttgcagtgggcatgattccaagtggttcaaacgatccttatgcattgcgtcgtcaagcttatgggattatccgcatcttagaaaaccaaaactggcacttcccaatggccgattatcaagctgcgatgagtgacattgttaagcaacaagctgatttcaaccttgattggtcaaccaatgctgacgcgatcagcgatttcttaacggatcgtgttcgccaacgctttaacggcatgcggcctaaagtccggcgtgatatcgtagatgccgtcttgaagaatcaaagtcaagatccagtcgtgatgttcgaagctgccaaagtgctttcagaccatcaagatgatgcagatttcaaggcaacggttgaagccgtgacacgtgtgttacgactcgctgaaaaagttgactttgcaacaactgatttaacggttgatcctgcattattcgaaaataaagctgaaaaagcactttacacagcggtcgaagacttacgtggtacaattgctacgaacccattagctgataattacggcatcttacaaacactacgaccattaatcgaagcttactttgatgccacaatggtcatggctgaagatgaagctgttcgtcgaaatcgcttaacacagttgatgattatcgctcaaatcgcccttaccttaggtgatttaaacgaattgattgttaaataaacaattcaaaaggggataatagcatgttacaaatgaaacgggtttatgaagcagcgacagactcagatgggtaccgaattctagtcgatcggatttggccccgcggcatttcaaaagaacgtgccgctattgagacctgggcgaaagaaattaccccaacgactgacttacgcaagtggtttggtcatgagccagctaagtttcccgtttttaaagaaaagtaccttgctgaaattgcagctaatccagcttggccggcgtttgaaaaggtagtgcacgagcaccttgagctgggcaacgtcacgttagtctatgcggcaaaggacctgcaatataatcacgttgtcatcttaatgggacttttgaaaaaggaccttgacaacgaatgagatagtttgctatatttatttgcaactgtacctaaatggtgctatgatatatagtgtatttttgtgctgataatccttaaaagtcgcatttcattgtgaggtgcggcttttacagtcttagtacaatttgaattgaatagtgaggtgagaccaatggcgggaaagattccgaatgacgtgattgatgatgttcggagccaaactaacatagtggatgttgttggtcagtatgtccagctcaagaagagcggcaataacctatttgggatttgtccgtttcacgatgagaagaccccatcattctccgttagtgaagagaaacagatttttcattgtttctcttgcggacggggtgggaatgtcttcaagttcttgatggaactggaacagattagttttccagaagctgttacaaaaatcgctgactttgtcggcttcagtttagcggagacttatcgacccactcaaaatgttcaagaatcaagtgaagtgacgcagtttaagcaactctatcgtcaggccaatgaactctttacgcatattttaatgagtactgaagcgggccaaccagcgttagattacttacacgaacggggcttgacggatcaattaattgagacgtttagtattggctatttaccggatcaaaccgatttaatgctttcattcttccagaataaagaagttccgtaccagacactacgtcaatccggcttatttattgaaactcagaccggcaagctgcatgatcgtttttccggccgagtgatgtttccgattcggaatgcgcaaggtgaagtgattgctttttctggccgggttttggtgaaacaaccagatcaacccaaatatttgaacagtcctgaaaccgtgatttttaacaagcggaaggttttgttcaactatgatttagcaaagactgctattcaccaagaacgcaaagtttacctgtttgaagggtttatggatgtgattgcagcgtattcagccggtgtttcaaacggtgtcgcttcaatggggacgagtttaacgactgagcagttgggaattttagggcaacaggctcgggaattaattgtctgttatgatggtgatcgtcccggaatcgaagcgatgaaacgcgcaattaccatgttgcagcaaaataccaagcttgaattgagtgtggtggttttgcccagtggcgctgatccggatgaatatgttcgccaatatggtgctgaacaatttaagacaaccttgcaaaatggtgctgaaacaccgattgcatttgaactgcggtatttgaagcaagggttaaatctggataacgagaaggatcaacttgattacgtgcaacaggcattgtccgtcgttgcgccaattgattcgccgcttgaaatcgagatttacctcaagcaaattgaagccgatagcggcattacccttgatacgttgaagcggcagttacaaacattgcgcgttaaacgggcaacgcagcaaccacttgcaccggcatctagtcagtatgattatgacatgccacctgaaccggatgacgcatttgtgggtggaccaccgccaatcattggtgatccgcgggcaacagcgacgcgtcagccacaacggctaacccgggttgaacacgcggagcaagaagtgttgcatatgttgatggctaatgacgatatgcgcctgcaattggagaacaatgccgattttagttttgtgcataccccgtaccaactgatttacgagttatggcgcgcctttttagctgaaggtaagtcgaccttggccgacttcatgggttatatcccagatgacttacaagccttagtcgttcagattgatgcgcttgacttaccagaagaggcaagtcaagaggcgttaaacgactgtctgttcgtcattgcgcaaaataacgttgaggaacaattaagagaagcgaaaattgccttaaaagaggcgaccaaattggggaatgcgagcgaagaaacgcgcttaaccctggaggtcattagacttgtttcgcaaaagaaattaggaaattgatattaggaggtttctgaatggctgataataaaaaagctgacacgaagaaatttgatactgcggttaaggctttaattaaggaatacaaaccaaagaaagaaatcaccaatgatgaactcgttgcaaaaatcgtgaaaccatttgcgctacaagctgatgaaatcaatgaattaatgcaaaaagtggaagaccaagggattgggattgtcgatgaagatgggaatccaagtgccgctacccttaaaaaggaaaaggtttctgctaaagaattaaaagatatgactgcaccaaccgggattaagattaacgatcctgtgcggatgtacttaaaagaaattgggcgggtatctcttttaaacgcccaacaagaagttgacttagccttgagaatcgaacaaggtgatcaagaagccaagcaacgccttgccgaagctaacttgcgtttggtggtttcaatcgctaaacggtatgttggccgtggcatgcaattcttggatttaattcaagaagggaacatgggcttaatgaaggccgttgaaaaattcgatcaccgtaaagggttcaaattctcaacatatgccacatggtggattcgtcaagcgattacgcgtgcgattgccgatcaagcccggaccattcggattcctgtccacatggttgaaacgattaacaagttaatccggattcaacgacaattacttcaagatttgggccgcgaaccaacgcctgaagaaattggtgctgaaatggatatgaatacggataaggtgcgcgaaatcttgaagatcgctcaagaacctgtttcccttgaaaccccaattggtgaagaggacgattcacacttaggcgattttatcgaagatcaagatgcaaccagtcctgaagaacatgcttcttatgaattgttgaaagaacaattagaaagtgtcctagataccttaacagaccgcgaagaaaacgtcttacgtttacgtttcggccttgatgatggtcggacacggacattagaagaagtgggtaaggtgttcggcgttacgcgagaacggattcgtcaaatcgaagccaaagcattacggaaactccgccacccatcacgttcaaaacaattaaaagactttttagaataaaagagtgcgtaagcaggcggctatattttgagggttagcatagtcaggcgaataaccaacgatgttggttgtttgactgacgtagctagccgcagaaatatgcctgctagagcacgttttcgataaagtgcgtttagttacgggagcaactgagcattaatacaatattgtcattaattcagattttagaattaatggcaatgttagattaagcggaagttgttgaactaaaaagcacgtttaggcaatcaataaaaaggccgcaagctaacctagcttgcggccttttttgcgtgtatctaaacaagcagagcaccaatccccactactaaaaatacaatccccatcaatgcacctgaccataacgccatgggcatgaagactgaagtactgtggtttgcttcaaccttcaaagtcttgaatgttttaatggtcattgaaagttggaaaacaccgatgattagcattaaaatcccaataattggtaaccagttcatgttaccacccccttcactgtaaataatttatcttatgttaactaggattttcgaaaactaataaagctcaaaaagaaggggctaattgacgtttataaccaattcaataaactagcaagactaatcccaataaagacaagccccatgaaagcactcgaacagagcgctgctggcgcaaagacagaagtattttgatctgcgtgtaattttaagtcttgataatactgatacgacttataaatttgaaaaatgcctaaaccaatcatgaaaacacagaatagttgcaaccaactcatgagaccactccttaatgtatagaaagcgttttcgatttaatttcagtataaaactaaattttgcctaaagcaacttctgctatccagaatcaagtgttcactttgactgcgtatgccgtctaaaatttggtatactaactataacaatcaaagtttctagaatggagttttatttttgtcaccaattcatttatcaaagcgtttagctgcggttgcgcagtttgtcccacaagatagcattgttgctgatatcggttcagatcatgcatatttaccaatttggcttacggaacaaaaccggttgaagggcgccattgccggtgaagtagttgccggtccgtttgaatcaacacagactcacgttaatcaatggcacttacaacaacagattcaagtccgcttaggcgatggcgtcgaggtattgaatcctgaagaagaccatgtgagttgcatcgtgattgccggcatgggtggtttattgatcacggaaattttaacccgtggattggatcatctgaacggccatgaacgactcgtgttacaacccaatatcatggaaagtactgtccgtgaatggttgaatgcacatgactatgcaatcgttgatgaagcgattgtcgctgaagacgggcatatctacgaagtgattgttggcgaaccccaaccatcagttgcaccattaagcgaaagtgatcgagtgtttggccctgttctccgccaaacacaacctgctgatttccaattgaagtgggggacaatgttgaaaaaacggcgtcatttattgcaacaattacaaaacgcacaagtcgtacctactgataaagtcaaagcagttgaacatgaaattgcattaatcgaggagatgaagacatgggaaaattagtcgcgagtgacttaattgctgcgattgaagactacgcaccattggcattaaaagaaggcaatgaccccaccggttttcaaatcgggcgacgcgataaaagcattgaacgggtgttagtaacccttgatgtccgcccagaaaccgttcaagaagcgattgaacagaatgttgattttatttttgcccaccatccagtaatgtttcgcccagcgcggaatctcgatctaagtgatccgcaaaacaagatgtatgcggatctgttaacgcatgacatcacggtatatgccgcccatacgaatttggataagactaacggcggcatgaatgattggctagctgaagctttacaactaaacgatgtgcaaccgtttaacatcacggactaccaatcattagtaaaattggtggtctttgtccctgagtcacatgctgaacagatgcggatggcattgaatcaagctgatgcgggacatattggcgattatcaagcctgcagttttagcacgaccggaatagggcgttttcaaccaacggacgcagcaaatccttatatcggccaatcaggtgatctagaagcggttaccgaagttaaaatcgaagttgttctgccagtggccatgcaaaccaaagttgttcaggcgatgcttgcggcgcatccttatgaagaacccgtttatgatgtgattccattagctaatcaacaacaaccgattggtattgggcgcattggtcaagtcgctcaatcaatgacggtccgggattatgcgcaatttgtctgcgaaacatttgatttaacaggtctgcgcttaatttcaaatgaaccggacaaaatagttcagacagtcgccgttgtcggtggcgatgggggtaaattcttcccagccgctttacaagctggtgcggatgtctacattaccggtgatgtgtattatcatactggtcacgatatgttggcagctggtttgtcagtaattgatcctggtcatcatgtcgaaagtattgtgaaggataagatgacagaaatttttgaaaagtgggccaaacagcgtggttggtcggttacattcattaaatcacagcaaaaaactgatccgtttacatttatttttaatgcgaagtaggttagaatagaattagtattaaataatatctaggaggctacaccatggctaaatatgaaaaattgattcctcgttttctagaatatgtcacaactgaaacacgttcagatgaaaacgcaacaacgagcccatcaacccaaacacaagtggtatttttacacaaattgatggacgacttgaaggaaatcggattaagtgatgtgaaatacaacgaaagtaatggctatgtaacagcgctattaccaagtaatattgataaaaaagtgccaacaatgggctttttatcacacgttgatactgccgacttcaatgccaaaggtgtcaatccacaaatcgtcgaaaactatgatggcgaatcaattattaaattagatgatgcgggtaaattcgtattagatcctaaagaattcccaaatatgaaaaattataaaggccaaactttaatcacaactgacggctcaacattattaggttcagatgataagtctggggttgctgaaatcatgacagccatggacttcttagtccaacatcctgaaatcaaacatggcgacatcaagattggttttggccccgatgaagaaatcggaactggcgctgatcactttgatgccaaagatttcgcaaccgactttgcttacacaatggatggcggtccaatcggtcaacttgaatacgaaacattcaacgctgctgccatgaaagtcgatattcaaggtaaaaacgtgcatcctagtgaagctaaaaacatcatgatcaatgcccttcaagtggctgttgatttccaaaatgctttaccaagcgatgaagtccctgaaaaaacagacggtcgtcaaggtttctatcacttattaagccttgaaggcacagttgatgaagcacacatggcttacatcattcgtgatttcgaacgtgatggtttggaagaacgcaaagcatttgctgctaaagttgctgatcaaatgaatgctaaatacggtgaaggccgcgttgttgcaacaatcaaagatcaatactacaacatggcagaagtcttaaaagatcacatggacgttgttgatcttgctaaagatgcaatggaagccgttgatatcaaaccattaatcgaacctgttcgtggtgggacagatggttctaagatttcattcatgggtattccaacccctaacatctttgctggtgctgaaaacatgcacggtcgctacgaatttgtttcaatcgaaacaatggaaaaggccgttgatacaatgcttaagatgaatgatttaaacgttgaacggaactaatcaacaatctaaaaagccccgcacaaattgaatttgtgtgcgataatccctttatggttgtcagatgaaatacaataattcatctgacgactatggagggatttttgtatgcccagatctaaacatacggtactcgagaaattaacaatcttagatgaactgacccaatcaaaaattggactgggtccggtggccaatcgccatggcattaatcataagacgctagagcgttggcgagatcgatactcccgtgatggaattaatggtctaaaggaggctaagaaaaacaaacactattcgaagaaactcaagctcaaagtagtccacgcatatcttataggcgaaggcacctttgatgaacttgcaaataagtttggacttcgtggatcgcagcaagtcgtagactgggtaaacaagtataatgggaataaacctttgacggcgtcgccgtccagaaagcaggttcccactatgagccgtaaaacaaccttggaagaacgcattgaaattgtcgagtatgtcaccaagctgaatcattcatacacagaggccgctgaacgcttccaagtctcttatcaacaagcacgttcatgggtaatcaaggccaatcacggcggctatgaggcgctcgtggacaaccgtggccatcacaaagaacaagctgagctgactgaactcgataaagccaatcttgaaatcaggcagctcaaagcacagctcgcagacaaagagcttgtggaggcattcgcaaaaaaattgctggaaatccagcgcagggggtgagtaaacaacatcgactgtcttacttcgcaattaatgaggtcagtcaaggcaagcgtggtgcaatatctacgctgttggccgttgtcggtgtaagccggcaggcttactacaaagggttaaatcgagaagaaacagcttgggaagcccgtaatcgtcagctcaaggaacggacacaatactggtttgattttcatcatcaaggtatcggtgctgggaaccttttattgaatcttcaacatgatgacctaattgacttccccgttactttcaggatggtacgtcgtgtgatgcgggagctcagcttgacatgtcaaattcgggtcaagaagcacagtcgacataaggagaacgaacagcacattcaagacaatgtgctcaatcagaacttcgacgtcgacagtcctaatcaggtctggttgtccgattcaacggaactgacttacggcgtaaataataagtataaggtgcgcttgagtggcgtccttgatctctacggccgacgtttattgtcctacaatttgagcactactgaaacgtcagcagcagaaatcgaggttttccaacgagcctttgaggcttctggcgacgtccacccattggttcacactgatcgaggatcagcctacacctctggtgccttcaacaactttcttggtcgttacaacgtcacacgtagtatgtctcgaccaggaacaccatacgacaacgcaccgatggagcgctggtggaacgaattcaagttacggtggatggctcgccatccactagcaaagacttgcgaagagcttgtaagactggttgaggaaggaatcgaatatttcaatcaccacaaccgctcagcacaaagaaacggcctcaccccagatgaatactggagtgaagccgcatagagacagattcaactttatattatttcatttgtcaacttgacagggcctagtgcagtgcggggctttttttgtgcggttaattttgatgcattgtcaacaagcctttgagttgttcaatgggtaattggcctggtgcactggggtgttcaaggtaaccgaaactcacagctgaaccgaattgaccaccaaaaatgcgagaggctaagccaaattcagacatcgccatcgtgatcagtggggttgtgtgatcatgtgtaaaagactgggtaatcgccattaaccgagtagtatcctcattactttgagcggtagttgctagttttaacatatctgggtgcgtcgcatgcattgctgcgagttgtttttgaagtgttagattatcaggggttgtctttaaatcatgatggcttagtaacacttgatagccattcgcacgtgcaagcgtgctgacggcttttctaactgcctcaggtaaagaccactcaatatcaaccacatcgccgatttgagccgataatagagctgtatagcggtctaaatagtcggttggatcagacaggccgccatcatgggttgttctgagcgttaaaataacggggtgcttgcaggcggcaatttggtgaccagccgttaataaggtcgctggtgtttgccaatagtctaagcgccattctagaatatcaatcgcagcttgcttttgctcaacgagtgccatttcacgcacacaatcgtctaggttacgcggcattaaggaaacggccgtttgtgtctggccagtgccaacatggagggtcatcaaatgacctcactttctaatcaaaatggataaacaatttttaaatcgataaggtctattttaagagaaaaagttgtttaacgcaataaacttaaccaattaaataacaaaaaagaaccaccaactggtagctcttttatagggattgattaatatgagcgacacgatattgaccatcaattaatttaaacgttcaaatttcgctgaaacgttcaatataagccgcttcacgacgttggtcattaaccgtggctgtctgccgctcatcagtgaagtaatcgcgcatttgcgctgtcactagaatatcttggcggttcggtttttcaggtaataataactcagttgaaacaatggcgatactctcaagttggttatgtttatggtgccgttgataacggtttaagatgcgttgttgttggtgctgaaaatggggcgtcattaagtccgccacgttgcttaagtcatttgagggccaagctgtttcaatttgatagaatgcattttcaaagcgcgccgcggtttcagcatctaacggcatggtatcagccagtgcccgttttctacgtccggttaaccagtcacgcactttacgccaaatcatgatcccaagggagacgaatacgaaaggcagggtgactatactatcgaataaacgacgcattggggacttgtagtaatgccgacatcccgcatcatcgtaataataatcacgactacggccgccaacataactggatgtcggtgaagacccaccaccgctaccacccgaaccaccagagccacccgaagatccgccagcacgcgcagcaactggacttggtaataaggtagattgtaaaattaatccgaacgctgttcggacaaaaaagatcagcttcctttaaaatggtgtttaccacaaacccatcttttaggagctgatcttttgtctagtataacctattccgaacgaattaaaatcgaaaccttttgtgaactagggctgtccaatatccaaatgggcgttcggctgaaccgatcaccgtcaacaatttcttatgaattatctcgatgtcaaccttatcaggctgaattagcacaaacagatgccgaatacaagcgatcacgatgtggtcggaaaactaagctgagcgatgagttaaagcaaaaaattctcaaccatttacgtctaagctggtcaccaggaatgattgctcacgaatttaaactagctactaaatctatttataattggctaaatcaggggagaattggtttctccttgaatgatctacctgaacatggcgtacgccaacggcgtaacgttgaccaatgatccaaatataatcaatctttggggcgatcaattgaacagcgtcccatgatgattaatcaacgtaagcgcatcggcgattttgaactagatacagtcgttggtcctcgtgggcatagtaaggcagttttattaactttaatcgatcgcaaatcacggttcctttgggcataccggttaaaagatcggacgacagcgactgttaatgaagcactaactaagttcctaaccacttttaatggtccggtgcacagctttactgtggaccgtggcactgagtttagtggactagtatcacttgaatcacaatatggtattaagacctattactgccatgcttatacgccagctgaacgtggtagtaacgaacgctttaatcggaatttacgttatttttatcctaaagggactcgttttgagcacattagtgctcaagatttaacgacgacgttactccaaattaaccagcgaccgcttaaaatactcgactggcaaacaccgtatcaggttatgctgacaaatttgtccgaaaattcggattaaatttgcaatctacctattaagcatgactttttgatactaaccatttaaaaatctcattaagtaaagtatgatagttttagaggaaaatgtaatgatatcaggttatacagctctttacggcttggttgcgcatccagcgcaccatagcttgtcacccatgattcataatctgggttttaaacaacatcaaatcgacgcgcggtatctggttttcgatagccaagcacggccgcaagatgtcgcaaaagcgattcggacgcttggtgtggcaggcgttaatctttcaatgccctataaacagtcgcttgtgccattaatggacgagttaatgccaactgcgcaactcgttggcgccatcaatacggttgctttacgatcgggtaaattggtaggcacgaatactgatggcgatggtttttggcgcgctttgcagaaaagatatcccaatctagctagtcagcagattgttattctgggtggtgggggcgctgctctcgcggttatcgaagccgccgctcgttatggtgtggcgacgattcaggtcttcaaacgtcaaaatacgacttatgcggcggttgaacaacgactggcaaaaattgctaatcaccattcgatgtccatcgtgctacataattatgccgatgaacaggtactccaacaagcactcagtaatgctgattgcgtgattaacgccacgaatcttggcatggtcaatacccctggattaccgctggcagcacctttaattgatcaaataccgatgacttgtttagttgccgacttaatatatgcgccacgtcagactgcttttttacagttagcggctcgaagtggtcatccaacccaaaacgggcttggcatgttagttgaacaggccgcgttgagttttcaattctggacgggccaggtcctacaaaccgatcccatctatcatgctttaacgaaggagttttaataatttatgattattcaatttaaaccaaatactgattcagcgctgattgatgatttttgcgcacgacaacgcacgacaaatccgaatgtctatcagattaagcaccatgtagcggtgatcggtgcaaaagcaattgattttaccccagcagaggaagaagtcattgcggcaaccaccacggatgaaccgagttacgtgcttggcagtcggctattccaacccgaaaacacggtcatcgaattagcacacagtacgattggcggtgcagacttcacggtgatggcgggtccttgttcggtcgaatctgctgaccacattatggcgatggccaaagttgctaaagaaggcggtgcgactattttgcggggtggcgcgtataaaccgcggacatcaccgtattcctttcaagggatgggcgaagctggtttgaaagcattgcgcaaggctgctgatgcttatcaaatggacgttgtgaccgaagtgatggatgaaacgcatgttgatttagtggcgcaatataccgatatttttcaaatcggggcgcgcaatatgcaaaacttttcattattgaaagctgttggaaaaaccaacgttcccgttgctttaaaacgtggcttagcagcaactgttgatgatttattaaatgctgccgagtacattgctgccaacggtaatcaacaaattatgctgttagagcgcgggattcggacgtttgacaatcactatacgcgcaacacatttgatttaaatgctgtcccagttttacaaaaattaacgcactatccagtcttaattgatccgagtcatgcgactggtgaatgggatcttgtgacgccaatggctcgggctggagtcgcaactggggcaagtgggttacaagttgagattcatgatcatccagaaaaagccttttctgatggcgcacaagccttaaagccagctacttatcttgaaatgtgtcatcaagtgtgggccgttgatgcagtcgtcaaacagtggcggcactaatggtgataattgatgtccacctcacacaaaaaaattatcagattcggatccaatctggtttgtatcacatctgtgctgaacaaatcgcgcaagtttggacacctcgtcaaatcgcattaatcacagacacgaatgttgccccgttgtatttagaaacggtcgaatctcaattaatccaagttggctatcaagtcacaccgattattattccggctggtgaaacgtcgaaatcacttgaccaagcaatggcactttattcccaactggcagcggcgaattttacccgtcatgacggggtgattgctttaggtggtggggttgtcggtgatttggcggggtttatcgcgtccacctatatgcgggggattgcatttattcagatgccaacctcgcttttggcacaagttgacagtagtgtcggtggaaagactgcacttgatttaccagctggcaagaacttagttggttctttttaccagccggatttagtattgattgatcccgactttttaacgtcgctggatcaacgccaattactggccggttatgcggaaatcgttaaagtggctgcactcaacggtgggacattttggcaacaggtgacagggattcaaagtgcgcatatgattctagcgcaggctgaaacactaattcagcaaagtgtgcactacaaggcacagattgtcatggccgatgaaaaagaaagtaatcaacgccaattattaaattacggtcatacgattggccacgcggttgaaaccctggccaatggcagcctgatgcacggtgaagcggtcagcatcgggttagttgccatgcagcacttagtcgaacaaagtggactgactgaagcgcatttaacaccagtgattacaactgttttaaatgcggtcggcttgccgacagatagcccgttacttatgagtgatcgactcttcacgcaacttttacatgataagaagaatcaaggagatgccattaatcttgtttacctcgatgcaattggtgttccaaaaattcaatccataccgctaacgactttagcggctaatctattttcaaaaaaaaactggtaaccaacccacagataccttacaatgaaactaacttgtaaagagtgtttaactgaccgtatgtgcggagcagtcttggaaccaacaatatatttgaaatagaaccataggggttgattgactagatgcaactgattttaatcggttttatggggtctggtaaaacgaccattgcacgcaaagttgcacatcattaccattgtgactggattgatttggatcgctacatcatgcaagaacagcaaatgacgattaacgaaatctttgccgaaaaagggcaggctgcatttcgacaaatggaatttgaggccttacagacattgatccaacacgatgggattatcgcaaccggcggcggggtcgtggatgatgctcagacgcgccatttacttgaacagagtcatatccccatttttttcctaaatgggagttatgaagcacattggcgccgcgtttcgcgcaatgatcggcggccacttgtgaatcaattgggccacgatggtttacgcgaactgtatcacaaacgacgaccaaagtattatcggcttgcggactacaccatttttttccaacataagacaccgaacatgatgttggcagaaatcgatacgcagctacccaggattcaaaaaaagttggctaataaacattagtcggcttttttcaatggtcgtagaatcatattattcgctttttaacgccatagacttgtatgatgaggttataacaaggagggtgaacaatgacatttaaattaccagcactaccttatgaatatgtggccttagagccgtatatcgattctgaaacaatgcatctgcatcatgacaaacatcataagacttatgtaacaaaactcaacgcggcgctagccaagcaccccgatttagcaggtaaatcattacatgatttgttaacacacatcgatgatttacctgagaatcttcaagcacctgtccgcaataatgctgggggccatgccaatcatagtttcttctggcgaattctaacaccgaatgcgccagaagcaccaacgggggaattactcgaacggattgaagcccgctttgggaagtttaagacgttccaagaagcattcaccgaagctgcccttggtgtatttggctctggctgggcatggcttgttatcgatcaaaatggtgaactacaaatcatgacaacgcctaatcaagattcaccacttatgagtcgtaatcgaccactacttggacttgacgtttgggaacatgcgtactacctgaaataccagaataaccggattgattacatcgaaaacttttggaagatgatcaattggccattggtagcggaattactttaataagggtgttcattataatacatttataactgaataaaataagacccatcacttaataagtggtgggtcttattttattttacacaattgtaaacactgtcatcacaattatagagcgatttattcttaaatgtaatagttgtagttatcattattgacatttttaatattaatggaataattatagaaatcattagggttttttaatagacaattttcagcagtccatgctaatctgaatatgttataaaaataataatacttttaggggatgagactatcaagaatgtaatcggaattttagcgttaggaatcctaacaactagcaccatcagttctatacaaacagttaaggctgaaccaagtgacaatcaccaaaatttagcgagtagcgtgctagcagatagcctcaaatccaaggtgaggcaccagcaaaatctaaaagcaccacaagaaatgaaaacctatattggtcgtggtgatgtttttaaagaaaaagaccggcaacgcagaacattacgctactcaagtttagagcctagcggtttatacgcccaaaaaggggatgttttgacagttgctcaggggatgcaagattcattatctatcacaattggttcgcccgaacgagaaaatcaaaaacaatatccattaacaaagggcattacaacgattaccgttgaaaacgagggcccgatttatgtgactaatcctaatgattctggtgaagcaacaatcacaatatcaggggcaacaggatcaatgccatatttcgatttaaatcaaactagcgtcgcagactttgagaaacaaatggcggaaatgacgaatgctaaagatgtgcagttggtcagtaacaaagcattaattacagttagttacgcaatggctaaaaaatatctcggtgaccctaaagaactgatgacttattatgatcggtttttaacggcacaagatcgggtttcaggcattactactgaaggaaatccagtaaactttgttgatcgccatctccaacatttcttagagtcacctaagttgtatatgtatacagaaaatgaatttatgggcttccataatgatcgcgctttgcaacgactactgaagacaaatgaaggttggagcatctggcatgaaagtggtcatcagagacaacaaacaccttggaaatggggtgctgttgtagaatcaagtgttaacatttatgcattagcggctcaaaaagaattgactggtaaaataacatcgttagatcaatactacccagaaatgcatacttatctaaaatctgataataagcaattcaacgcacaaaataataatttaaagatggttatgtttggtcaattaggaaatacatttggtgataacttttaccccgttttacatcaatactatcgtgaaaacaagcttgcatttggaccagacaatgaacggatgcaaaactttgttctaaatgtttctagaattacgggttataatatgcagccttatttcgaacaatggggatttgatatttccgcagcagttaaagctgaaattagtcaattagcacctttaccagaagctatttggttaaatgataaagaaactaataaacagttacccatgcgcttaatcgataccgtatcgctgaatgaccacggtattcaagttaacctgactgactaccaaaccgatgtatttaaggatgagcaattaatccttaaaaagaatggacaagtgatttccaaactcgtcaataaagagccaattgaaagtatgttaacaaataatgtttgggaaacaatcgagatgcttaaaccgactgatgtgattacaattgaacagcaaaataaaaatggtacttttaaatgatatgaacactcaattgatagtattgcacttgaagaagagttattaaactatttgaatgcatcagaaccgattggtacaattctaacccaagctaaactagatgctctccgaaatcgaattgatgctcttccttctacttttgactataaagaaagactcttagaactatttacaaaattagaagacaaatacctagctacattagtcaaagatattcaactggattcacaatcagcattagtggtatcgtttactgatgagaagtttaaagactatgcgaaaattaaggtacttgttgacgaccaaccagttgcagaggtcaaaaatggtatcagtagtggtggtcagctcgacgataatgtcttaacaattcctaaccaagcggatgcacatgttgttaccgtagtggctgaattaccgcacaagtcttacattctcaaaatgattagtcaggatattcttcttctgaaacgtcaagttgaagcgttatttgaaacaaacgatcagttgaaacctgaggtcacacaagacctattagattaattacgaacacaaattaacgcagttaagggctcggaaaagacgatattgactcaaagaattaaccatgcacagcaactgttcttgaacactttagttgctgacatgagtgttaaaaataataaaatcgtcgttacctttgctaacgaattatttaagcattataagatagtcgtattaggaaacaacagctatctggcagaagtcaccaatggccaaaactactatggttccctaaatggaaatgtatttactccttctaaatcagttgtccatggacatccttatcgggtagaagttagacacgcaagtggaacttacaagattagagagatgattgctgagtaaataaaatggtcccacatcaaaatacgatgtggggccatttttatctataaattactatccgttgtaaagttgagtggtgataggttcgcgctatccgtaatcagttttgcggtgaggcgttccatttcgtgttgggcaagttgcgcagcttttgcagagcccttggtcatcaacatcgttcgttggaccgcatcggtttcagcagcaaccgcttgatcggttgttacgatattttgaaccattaagctattgatgtgtttttgcgtttgttccaagtccttggcgaacttggcgtagtgtgcatccaccaaaataccagctaatttataggtccagtagatcgaatcttgactgtaatcctttgtccctttttggtaattgactgggacgtcatcggcacccgcatagaatggcacgtagacactttgtgccgtgacacccattgataaccagtgaagcccgctgacatcgaccggtaagttagggcgcatttggagaatgtgtgattcttgcgtctttgctaaactaattgggcggaaagcatgtttttcttgtggtgtgccgtgaccgattggatcgtagaccgtgccttcataatgcgagcctagaattcgcgcgacatcttcgacttgaatgggcgcatcggcttgccgtaagaaggggaggttaaagtcttgaggttgttgtgcgacagatggcgttaacaatttttgaccgtaccaaacgcgcggtgtgttgtaaacaaggtcgctttggtctttggtcccaaagatatcgcggaagttaaatggcgtatcagcttgccataggtgattatcacgcacaaaatcttgaatcccgtctgaagtcatgaaccaatccggttgatcgaattgcacttcttgaatcgcgagttgattggcaaccacggcatagctatcatccggaatccgttgggcaacccagtgatgtccactgccgatttcaagataccagacctcatcgacatcggaaaagagaatcccgttactttcagtggtgccgtattcactaacgatggcgcctagccgcgcaacaccttcacgggccgttttcacgtaaggtaagacgactgtaatcatggattcttcagcaatcccgttgtcgatgtaggggtcaaagccgagaacgcgactgttgctataagcactttcggtgccgctcatcgcaacgccgtattcgttaatgccgtcttcttcgaatagtccatattcatcggtccattcgggtgtcgccgtgtattttgcggcttcaagtggtaaatcgattgaaaaacccgtgtcttttgagacaaagtgcggggcagtcgttaacttttgatggggatggatggttaaatgtttaggccaagctgcctggctatcttcgttacgtgcgattaaagttgagccgtctgcagtggctttcttaccaactaaaacactggtacaggccgtcaattgacggtaaaggggttcactcattgtaatgcctccatagataaatcaatattagctattattatacattcttttgcttaaaaacacagtaattaccgttgctcaattgcgttaaaacaggcataatataagtattcaattaaaggaggcaccacacatgccattagtacacatcgatttaatcgctggccggagccaagcacaattaaaacaactctgtgcagacgtcacagaagcaatcactaaaaacacaggcgcacctgcagaacacgtgcacgttgtcctaaacgaaatgcaaccagaccactactcagtaggcggcgtgctaaagagcgacgaaaaatagagtgcgacgtcagatggtcatacgctgaggattagtctaataccgtgaatgagcggcgtagccgatcgtttgcggtatgtaactaaccggaagtgtatatctgacggagcacgtttcagaatagagtgtgcaataagccgggtatcttctgaggattagcctaatcaggcagattaccgacaaaatcggtgatttgacggatgtagctaagcacagaaagttagcttgaaaagcacgtttcatccatcaaaaaaagcgattcgaccagaaattgtcgaatcgctttttcattaatccatcttaaaatattgccgtaaataattggccacaccatcttgcgcattcgtcagtggtgtgatgttgtctgcaatcgccttgatcggtgcaattgcgttttgcatcgcaaccccggtaccggcataggctaacatatccaaatcattactttcatcaccaaaggcaatgatatctgattgatcaatgtcgtagtgtgccgctagttttgcgaggccggttgctttgtgaatcccatgatgcacaatttctaagacgctagcaggaccaccccaagtgttgacggaaacgtcagggaattggcgcagaatttcagcacgtaacgcatcttgatcagcgcgttccacaaaaaccgtgacggccgctgggtcttgccgaagcgattcgcgggttaaaatttcatcggacttcaacgttgtggggaagaaagaaaacgtgttggcataagcttgatcagctaaaaacatcgttttaccttcggcggcaatcatttgaatcttaaagcgttcttttagttggaagagactaaagacaatgtctttattaatcgtatattgatattcaccggcccaggcttgtcccggaatgtgcattaaagccccattaaagttaaccattggcgacgttaaacctaattgttggtagaaaggttcactcaaacgatttgggcgccctgtgacaatactgacaatgtggccagcgttttgtaattcagttaaagtttgttgcgttttaagtgtaatttgggcatctgaattgagggtagtcccatctaaatccagtgcaatcaatttttgatgcatagcggcgcctccttttaaaaacgtgtttggttaaaacacgatatgtctttttattctagggggtatgcggattgttgtcaatgatcgtcagttgtaactggtcggttgaaccagtataatagagctattagagtgaccaggaggcaggacacatggcagaccaaccacaagatgatgcagcaattgaagacttaaaggaacggattctagccgcgctcgagaccgtgattgatccagaactcgggattgacattgtgaatctcggcttggtttacggtttaaacctggatgaaaatggcttatgtacgattgatatgacccttacaacgatgggctgtcccttaaccgatgttttaacggattcgattcatcaagcaatgggcaaaattccagaagtcaatgaaattaaagtcaatctcgtctggtacccagcgtgggataccagcaagatgtcccgttatgcacgcattgcactcgggattcgttaaaacgttcgatttggccttccgattgggaaggtttttctaatcgtttaagagaaacttatattagaaacggaatccattatgatacagttaagttatccagagaaattgcgccagagtcaacgtttttttgcaaccgtcccagccattcaagtacaaattcatgctgttttaactagtttattgcagattgaacaggacggcttgcccatacataatttacccgttttgggaattgatgaatctctgtatttagaaatattactccaggctgaacagggggcttttagcgccgctagtgtggctgaggttcaacgtcagttacagttaatcgaccacttactgcgcaattaccgtgaatatttgcaaaatcgctttggcatgtgggcctatatcactacagatttgacggcggcgattgtccgcgagtttcccaattggcgttttctagaagtcatggctggtaacggctatttaagtgctggtttacggcaggcaggcgctgatgtgatttgtaccgatagtttagcctggactgccgagaatgaaacagggcgccaattagtcacgtcagtggcagctcttgacgccaaacaagcggtcccaaaatatggtccgcaagtcgatgcagtcttaatgtcctggtcacccaacggcgtcccagttgattatgaattgctgcaacaacttcgtgcaatgccaaatgcccccgttttgttgtgcttaggcgaacgttttggcgccacgaatagtcacgccttttggacggcggcccattatcacaacgacgcccgtttatcacggattaaccgttacttacgcccattcgatttaatgcgtgatcggttttactggattcaatagtctgctttaaaggagggcccactgtgcgcctgaaaaaaataatattagattgtttactagttggtttaacagttctaggcatgttaacgattagccaacgtgcaaaaactaactatagccaacgcttaaatcacaatagtttatcagaaaatgctgtgatttttaattctaagagtcaacagtcgattcaaaaaaccattcaaaaaattgatgccgcgaaattaagccattttcaaattcaattcaacgttgattcccggttctcatatgtctatgcgaaagggaagttatcgagtgtcccattaaaagacggccggttcttctccagttacgatttcaaatcacagattccagtcgtcgttgctggtcaatcacgacttgctgaactctacaaaccagctagtcaagcgtattatcaagatcatggtcgctacttatccgtgattggcgttgtcggtacgaatcagacaactacgcttgatcagcacatttttgtatccacgtcaccagaatttgtattaaatgatcgcccactgaataaagtcaccgtattggttgatggtccgcagatgggagcgcatctgaaaacttaccaaaagattttcaaaacgactaagcacagttatttaacaccgaagacgacgccgttagtcggcgtcaactggctccgtcaaaatgcgggtgtaatcgcggtaattgccgtcctcatgatcatcgcggtcggtttcacttatttatttagccaagttatcaatggttatcacgcacaaaaagggctcagcactggtttatatcgtaaattccgcgtggcacaaacccaaatttttgcgctgcacctagttgttagctcaatcattggcttctcaattggtagttggttcttttacctaacgggtcgaacagcgatttttattggattgatgatcattgatctcatcttaatcggtatcttttattatttaattccaaaaggacgaaaaacaacatattaaaaaaacggtttagtcattagattgactaaaccgtttttttttaagggttaaactttacgccgtggttcaataaaaacagcgcatgcgccactgataaatacaagactgaatagagttgtaaaccaatctcgaactgctgttaagcggtctggcacaaaagtcataaataaaatcatcgataataaacacgctgcaaacatcgttttaaaaacgcgatacataataagctgtgagcgttcatccgaacgtccaattctagttataccatagtagaaaaacagaattgaaatgatgattaatccgattgccacaccagcgattacatgggcattttgatttaaaaagtgtagtaggggccatattgttacgcctcccgataagtgaatagaacgtcaattggtacatcaaaaaatcgtgcgagcttaaaggctaaaatcaaactaggtgagtagttgcctttttccattgcatagatggtttgcttggaaacaccaaccgcttgacctaatttttcttgagaaagatgttggagtactcggtattcatagactttattttcgacataattcgtttctttcaatatgcaccacttcattatcaaagtttacttatacttttaacaactatatttttacattatccaagttaatttgtcaagtgctttagcgaatatccaaatttaggcattactgcaaattacagtatccaacatcctgttgtgcaacctgattataataagttccccaagttgccattgcgttaatcacgggactcagtgtttgaccaaattcagagagttggtattcagtctttaacggccggagactaatcaccgttttagtaatcacatgatccgcaattaattcttccagctgtagggctaacatgcggcgcgaacaatcgggtaaagcgcgcgtcaaatcatcaaaatggagatttgaatgttgcaaaagttgataaataatcacacttttccatttacccgagataatttgaagcgtgctttcaaccgggcagcccgcctgacaatcataaatgtgccgttcttgaaccatgaaatggcctcctttgataccgccattatagtccgctagcagtcatttgcctagtgaaaacaatgtaactcgttacattcgatacacgattgttacggggcaattaatgttttagactaatggtgaataagaaagaaggcatttttaatgcaagcaattggttttaccaaacatttaccgattacaaatgaagaaagtttaatggcttttaatctccccagtcccaaaccaaaaccacacgatttatgcgtacaagtgaccgctgtttcagttaaccctgtagatgttggcgttcgaaaagggggtagaggacaatcaaaaacgccccgtattcttggctgggacgctgttgggattgtcacaggaattggcaatgccgtcacgttatttaaaccgggtgatcgtgtcttttatgttggggactttaaacgaccaggtagtaatagcgaatatcaattagtggatgaacgaatcgtcgcaaaagcaccgcagaatttaacggacgcgcaagctgccgcgatgccgctcacagcgctgacggcttgggaagctttatttgagaaattacacattgattttgaagatcgaaccactaatcatgatcaaaccatcctaatcattaatggggcaggtggggttggttcgatcgccacccaactggcacatttggccggattgcacgtgattgcgactgcctcccgtccggaaacgcaaaagtgggcgctggcccatggtgcggatcaagtcgttaaccatcatcaatcactcattgaacaggtgcacgcactcggctatcaaacggtcgattatatattagagttgaataacatcgatcaacactgggagagtatggcgcgcctgattaagcccaatggccgcatcgcttcaatcactgaaaatcatcgcccggtcgatttacaaaaattaactaaaaaacgggtcgagttcgcttgggagtgggttttctcaaagacctactatcaaacaacggatttagcgagtcaaggcattatcttaggacagattgcaaccttattggaacaaaacaaattgcaatcaaccctgacaaagtgcttaagcccaatttcagcagccaacttacggcaagcgcatcaactggtcgaaacgaaccaaatgattggcaaagtcgtagttgctaattaagcaatcaaataaagcccggtagaagaaatccttctaccgggcttttgctgcttaaaatgttatgtgccgttcattcaaataatgccgtaattcaggcgagagaataattggcgccttttggagcgcttgaatatcgcgtgcgccaagcattgccataatctcttgaatctgcgcttgccaagtgagcaagttttccgccatttgtgtcgggccttcttttaaaaccatgtgcaagaattgaccggaaatcccaacagcactggcaccaagccgaagtgctttaatgatatctaggggattccgaatcccacctgaagcgaggatgttgacgtcattttggaaagcgcgtgattcaaagagcgattcgaccgttgattggccccaatcagctaagtaatcgtaggctttatcatgacgccgttcgttttcgatcgtgacaaagttggtcccgccacggccagaaacatcgatgaattgtacaccgatttgcttgagttgcgcaatcgtatcagcactcatcccaaaaccaacttctttcacgataacgggcacaccaacattggcgacaatgttagcaatctcgtctaaccagtagaaatcttgatcaccttcaggcatgacaatttcttgtggcgtgttgacgtgaatttctagggcattggcttgggtcattgcgacggcttgcttagacacattcaaatcattaccagcaccaatattagcgagtacaaacccgtggggattgaattcgcgaatcacgctaaatgtatccgccagtgacggatctttaatggctaccgattgggagccagttgccattggtaggttggtaatttgggcgacttgcgctaattgtgcgttaattttctttgtctgctgactaccaccggtcatgccgttgatataaaagggactggcccagttagtcccggcaaaatcggtactgatatccacgtcggataccgcaatttcgggtaagctttgatggataaaccgaattccatcaaagtcattgatggcatcaccatggcggaatttttccgctaaaaagacatgttcatctttccgatgagattgaatggattgtttgggtctgaccatgggtaagctcctaatctacgaggtgaactgcaaggttcaatcgttcaatttgattggcccgccattgttcaaagagggcctctgtttcgatagcgcgatcaataatgacaatcccacaatcaccaccgccagcaccagatgttttggcagcaccgccgattgcctcggctaatgcgcccattttctgtaatattggcgtttcaatagcgacgtgactgaagtgagcgagatcttgtaaaatggcacgattgtggcgtaattcagcttggatctgggctaaatcattacgacgaaacccttcgaccatcgcttctaagcaagctttgctagctgcgaggaagttttgataatcggcttgccgttctgttttagcaagggcaattttatccaccaagtgcgaggttgaagcgggcgaccccgtccaaccaatcaagagtgacaactctgctggcggtgttaataattcgattgaaagactaggccatggcatttcgagcagctccgttagactaacagttggtcgaatgtcagcaagccattgtttatcaaatgaccgataagcgacccagccaccaaaaacactagcagcaatgtcgcctaaagaaccgttgccctgcacatctaaatgcgcaatagcagcaagtttatacaattggtcgtttgatagtgataattcataaaaggcgcagagggcttttaccgttgcaacggttacggcggctgaactgcctaagccgtattttttaccatcagcagagtctaaatcactatttacccgtaggtggtagacgcgcagtgtcttacccgcttgacgtgcgtattgttccgttaagcgaatcgcggacaaaatataatggaagggattatcgcggttatcaaaaaccatttcatcaccttgtcgttgccaataaagggaattttcttggtattgtttagacacaatactcccatattcatgactctcttcaattgtgactgtcacaaattgatttaaagccacgataatagccggaaaacctgtttctactactgcgtattcgccagcaatatacagctttccgggcgctttagccgttatcaaaccatcagaacctttcacgtttaacttaaatttgcattatcgatagctcacaccaggacctggtttagcaacaaggagttgttcaggactaaaatagggcgcaagcgccgctaaaatctgaggtgtttcctgactggtacaaatcactttcacgtttggaccagcatccatagtataatagcaagaaacaccctgttggcgcaaggtctgcacgactttaattgcttgtagggtttcaggttcaaaataggtgaaaggtgggacggcactaagggttgtcgcatgcatctgcatcgcactttgttctgctaattgccccaccaaatttatatctttcttaacgattgcggccttcattgccggaattgcggcttgagcggtttcaacccatgctgggtagtagggcgacgtggccaccgtattcgccatcccagcacgactggcgatggctttttgacgatcatttaagacaatcgcaatcatctggatgtcccaatcaactgtttcttgaacgggaacagcgtatgaatccaaatcattggtcccacgttgccattccacaaaaccaccataaatcgagcgggttgcagagccagaaccacggcgggctaatctcgaaagatcccgatcgttaagttcaagcccagctgcacgactacctgcagcagctaatgccgcataaccggaagcagaagaggccaacccagcagcattggggacatgattaatggtttccacagcagcaaataaaggcagatgcgcctgttttcgaattaaatcgagaaactgactcatctgcgtactagttttggtatccgcaatggcaccattaaagctaatttggtcagcagtcaaatcagttgaaaagcggaccgttgtatctgtataaaaatgatctagcgtcattgaaagactactgttatacggaataatcaattccggattttgttttccccaatacttaatgagcgcaatattcgtatgtgctctggctgtaattgattgtcccatagtaatactcctaatgtttttttaaagtgcgtgtagtggttgaatccaagttttgatggcaccagctgctgataaggcttgtgccaaatcatccgcagcactttgcgtagcggccagggcgataatgcagccaccacggccaccacccgttaacttagtgcccaaactaccggtctgattagccacatcaatcaaatgatcaacacgggcattgctgacaccgagtgcccgcaaatcaagttgagcacggttgaggttcgcgccaagtaccgttaattcgttttgggcaatatttcttgcgacttgttgcgttagataacccaaatggtcaattaagggttgcgtttgttctggattggacatcatttgattctgaacgcttttgacggcggcacctgtttgccccttttgaccgctgtcggcgattacgagatacccttttaaattaatgggtaggggttgaagcggctgccctttgacaaaccataatggtgtagttgcgccggttgtcgcggcgtcaatcccgcttggattaccgtggattaaattttcggagagcgcggctagctttagcagccgttgttgactgagctcttgatgataagtcgcaaataacgctcgaatgatggcgacggccgttgcggctgaagaacccatcccgcgttcgggcggtaagtcactttcaatcgtcaattcaaacggggttaagttcggatctaatgcatgccacagttgttcaattaaccggcgaatgccttgcatctgaccaacagcctgttctagaggaccattgtaataagtactcttaatttgcggtgtctggagtgccggctcgagagttaccgttacccgcgcttgaaccgcaaagatggggagggcaatcgcaggttgtccataaacgacagcgtgttccccaattaaaataattttcgcatgactttggccaacaccagtctgcatacaatcacccttaatctctttttctgacttgaagatacccttactactatactgcaaaacaaaaatgaccgccacataaatcaaattgggcacaggttaatgggtttcctattatacccgctttttaccaacggactagccggattttatcccaatcacttgtctatctatggtaaaatgacgccaaaggagtgtgggcgccatgagcttaaaatttattattggtacagctagttatgaccaccatcaaacactagtcaagcaactacaaacagaccttaaggccaccaacacggaccgctttttttatttggtcccgaatcatatcaaatttgaatctgaagtcgcacttttaaatgacctaaaaacccctggaagtgagtatgtcgcaacctcacgcgtccaagtcttctcattaagtcgattagcttggtatttcatgaaaaataccccgtactaccagattccgcggatttcaaccgccgggttaaacatccttgtctaccgcctcttgcaagaacatgcagaagaactcagcttatttggtggggaagtcaatcaaacaggctttgttgctcaattaacgagccaactattggaacttaaagtgggctgtattacacccgatgagctaactgagattgcggcccagctagcgcccgaagaagtcgaactgactactaaattgcgggaaataaccattattgccacggcgtttgaagccgctatgcaaaagcaattcatcgaaaatacgacgttaattgatgccttaactgattatttaaaaaaacaagacttacacgattgtcatttctatatcgaaggtttcgcacaattcacggctcaagaacaagcgctagtcgccgtcttaatgcagcaagcaagcttaaccgtagccttaattaccgactatgttaattaccaacaaccaccggaaaaactcagcttcttttatcaagctgagcgtacgtattatcaattataccaacaggccaagcaaaatcacattcccatcatgactgatcagattgccactaaccagcgggtttcaccaacgttactcgcgcttgatcggtactgggttgcttctgaaaaccacggtcagatcccaacagcaccggaaatcgattcgacgcaacttcaagtgatcggtgccgaaaatcggtataccgaattacggtatgttgcccgtgaaattcgtcgtttagtccaaaccggccactatcgctaccgagacttcttgattatgactcggcatttagccccttatgaaacaatgattgcgccgatttttacagaatacgaagtgccgtacttctgcgatttaccggaaacaatggcggcccatccacttgttgcgatgttggcagcgttgtttgatgtgaaagagcattactaccgctatgaagatgtaatggcgcttttgaagacggagcttttaataccagatgactatcaatcagtcgctgaattccgggctgatcttgatttgtgtgaaaatctgattttaaaaagtgggtatgaagggcatgattggttaagcgcagccgattggcaatattatcggttcggttccttccaagatggtgttcgaacaacagaagatgaagtgctcacggaacggatcaatcggattcggcattatgttcaatccgtattaccaccattttataaacggttagacagtgccaaaacagggcgcgatgccgctaaagtgctctatcaattcttaatcgaacaaggtgtcgatcgacaattgttaaattggcgggaccaagcactcgcagccaatcaaattgccttagctggccaaccggaacagacatggcaaacatttatgacgatgttggatgaatatgtgacgttattaggcgaccaacctttcgaactaaagggcttttgggatttactagcggccgggtttaatacggcgcaatatgcgcaaattccatcgacactcgaccaggtcgttttatctgaatcagggatggtgcagactaaacgccgcaaaattacctttatgattggtgcgaccgatcaagtgatgcctgatcagattgaaaccagcgccttattatccgaccatgatcggcaactattaaccgatcggttcaattcagaacaattcttaactgatccaagtgccagtcagatgagctttgaaccttatctgaactacttggcctttttaagtggtactgaaggattgtatttcacttatccattgaataatggggaaggggcgaactacacggtatccccctatgtcgaccggattaaaaactacttccatttaaccgagcaacgcgttctagcagaagtcattccgacaagtacagcgccaattacgggttcttggcgtagtttgttaagcgatttgattcaagttgcgcgacaagcacaagcgacgcaaacactaattcctgaccaatggcagactgtttatcgtttattacaacaatttcctgttagtcactacttaaccaatcaactccttcaaagtctggcgtaccataaccaacccgttgcactgacaagcgatattgtcactgggttatatggcaatgaaatccatacgtcgatctcgaaattagaagagttctatcaaaatcaatacgcttatttcttaaaatacggcttaaaactgaacgagcgcccaatttttgaactgacacctgcaaataccggtgatttctaccaccaagtcttagatcaatttatcaagatgattcaagcccaacgcttagtcttactcgatctcgataatcaacaaatcgatgcattgacggatgaaatcttacaaaaagcgtatgaacaaccagaatttaagatcctcaataaatcagcgcgaatgggctacattcgccaacaattgagtcaaacaattaaacgcgtcagccggacattgcgcgatcagagtcaacgaacgaacttaaaaccgttggcaaccgaagtcttattcggccaagttggtgcccaacaaggattagctggtctagaattcgaattacccaatcaacgtcgggttaaggtgcgggggaaaattgaccggatcgatcaactgacattaaacgaccaagcctacctgggaattgttgattacaaatccagtcaacacagctttagcttccgcgatgcatactatggtttggcattgcaaatgttgacataccttgaaactgtcttgcaagatcaagcagcaattttaccagcgcaaagcaaggtaaaaccagccggggccttttatctgcaccttcaaaacccaacaatgtcattgaagcaactgaacaaacaaaaactcgctcaactacaaaaaggcgaactcgatcaattattactggatcaatttaagtatgatggcttaattttaaacgatgagaccttactcgaaaacttggatacagctttagaaagtggctattcaccactgtttaacttcaatcgtccaaagagtggggcattcaaatcgaaacaactggtcacccttgatgagttacagcaattaattgcccataacgatcaactaatcaaagcagcgggggaagcgatttttgctggcaaaaatgctttgaatccgattatgcgacccgaccgcacgaatgcactcacaatgtcgccatataaatcgattttccaattcgatgcgatgttaccagaaaataattatcgccaattaagtgcgcttgataatcaagccgtcttagccaaaattatgaactcggaggaagaacgacatgagtgatcgccgatttacaccaacccaacaagcagccgttgatcacgcggggcatgatatcctcgtttctgcctcggcgggctccgggaagacaaccgttttagttgaacgcgtgattcaaaaaatcttgaatggcactgatgtggattcactattggtggtgacgtttaccgaagccgccgcatccgaaatgcgccaacggattcaaacggcactgcgaaaaaaagcaagcgaggcaaccgacaaagcggtgcaacaacgcttacggcagcaactcagcctagtcccgaccgcacaaatcagcacgttgcatgcgttttgcttacaagtcattaaacatttctactacgtgattaagttagatcccacgtttcggttattaagtgatactgcggaacgtctcttattagaggatcaagtttggcaacgcgttcgcgaagaacattaccagtcaaacgacgccttattttatgatttagcgcaaaatttttcgaacgatcgcaacgatgatgggctaaccaacattgttttcgaactgtttaacttctctggtgccaatccaacgcccgatgaatggttacaatctctaaccgccccttacgaggtaccagagactggcctaacaaccagtgcttatttcaaaacaacgattctgccaaagttagaagcgaccttggcaacctgtttaaaagacttggcactcgccaacgaactaagtcaaacaaacgagaaatttgcggtatacttgccaactatcgcaacggcacaagcagcactaactgccattcaagccaacgcggccactttaagttgggcgcagtggcgcacacaattgaccgacgcccaattgggacccgccaaacgaactaagaaattagaacccgatgaacaatatgacaaggaccggatcaaaaacgccctcgataatgtcaaaggggcactaaacgatcttttaacaacctattttgtctttgacgaagcacaaaccagtcagattcaacggcgcgctggtgagttagtcggtaagttagtgacggttacccgcgattttaagcaagccttccaagctgagaagaaacgccgctatttactagattttggcgatttagaacatttctgtttggatattttggccggtgacactccggaatcagaggcagcacgaacgttctatcaaaataaattcagtgaaatcctggttgatgaatatcaagatacaaaccagttacaagaaacaatcattcaaactatcgctagtcaagcaccccgcaacgtcttcatggtgggggatgttaaacaatccatctatgcctttcgattagctgatccgagtttgttcctcggtaagtacgacgaattcgccaagccagataacgatagtgaacgcattattctcgcagaaaacttccgttcacggcgtaatatcgatgatttcgtcaacttagtctttaaacaaatcatggaccgccaattagggcagctagattacgatcacaacgctgaattgcaatatggtgcgacttattatcctgacgatcaaccaactcagccaactgaattacttttatacgaaacaaaaccgactgatgaagaatcaacgggcaagcttgataaagctgaaggtcagattgcatcagttgcacagcgaattaaacgaatgattgataatcaagaaaccatctgggatcgggatacgcaagaaatccggccaattcgctatcaagatattgtcttattgacgccaacgcgcaacaacaacctaatcattcttgattatttccaacggttcggcttaccgattgtcattagtgatgcgcagaattatttccaaacaacggaaattcaaatcatgctatctttcttgaaaattattgataatcccaatcaagatattccactggttagcgtgcttcggtcaccaattgtcggtatgaacgaaaatgaactcgcattaatccggattaatgataaaacggatgactattaccaagccgtttttaattatcttgatcagttcgaagcacaaaaatccggccaactcggccaacaagtcttcgaaaaattaacgcatttccaaaccttattaaatgagttacgagccattgcacgtcaacggccactcgttgatttaatctggacaatttaccaaaagaccggctttttagattacgccggtgggatgccagcaggtcgccaacgccaagcaaacttgcacgcactctatgaacgcgctgcgacttacgaagcaaacggctttaaagggctcttccagttcatccaatttatcgaacgtttgcaaaaacaagataaggatttagcccaaccaaccagtctcgccaatcaagatgccatctctgtgatgacgattcatgggagtaaaggcttagaattcccggtggtctttctaatggatgccaatcatcaatttaacgagcaagacttgcgccaaaattacgtgctcgatgatcaatcgggactcggaattgtttacttagacgcgaaaaaacggttaaagattccaacactaccagaattaaccatcacgacccaaaaacggcaaaagttacgcgctgaagaaatgcgaaaactctatgttgctttaacgcgtgccgagcaacggctgattatcgcgggcagttgtgataaccaagcgaaactatttgcaacttggcaaaaaggacagcaaaatcctgatctgcggttggacgcttctgttcgtcaagctagcacgaacttactagattggattggattgagcttaattcgtcatccgcaagcccgtgattggaccgaagaggggacaccattcctacctctgagcgatgacgcaactgaatttaatttaacgtttacaagtgaaacgcgccttggcgaattaccaggtgctttacaccatgatcaagattggagccagcaacaacaagtggcactcaaggcggtcgatttaacaactgatttagccaacgggattcaagaccagctaacattcagttatccagcaaaaggcgccaccgaaacgacagcttaccagtctgtttcagaagtgaaacggctctttgaagatcccgacaatgatcagttggggcaattacgctttgacgctgatacaccgcaacaaacccatcgttacgtgaccgatgaactacctcaaccacaattcatgcagactgttcgaaaagcgagtccggctgaaattggaacggcgacgcatctggtcttacaagaaatcgatttaacccaaccagtaacgatcgatcgggtgcaaagtgtcatcgaccgacttgttttacaaaaaagcctcactgccaatgttgcacaacaaattaaagttgctgctatcatgacattcttcgagagcgagttgggtcagcaactgttagctgaaccagcgcaagttcatcgggaagtcccattttcactattgttaccggctgcatccttattcgccggtttacgcccagaagatcaagacaatgtcttaatccatgggattatggatggttatgtaaccacggataccgactgtattttgttcgactataagactgattttgtgaacctagctgatccagaagctgccattgaggcgattaaagcgcggtataccggccaaattaacctatacagtgccgcgttgacgcaaattgctaaccggccggtaaccgctaaatatctctatctattgtcgattggccaactagtcgctattaactagactggtttctacgcgtcattcatagtatgattgatataataatgagtaaagtattggtgacagcatgaaccaagagacaatttatgccgtcgttgatttagaaacgactggcacaaacattaaagaaggggaccgcattattcaattcggatgcgccctcattcaaaacggcaaaatcattcagacgatttcgcaagatgttaatccgcttcgcgacgtaccgactaaaattcaacatttgacgcatatcactgctgatcaactcgaattagcaccgattttcgaagatttagcgccaacgttagttgaactcttatccggtactgttttcgtggcccataatattaactttgacttaccttttttaaatggcgaattagaacgcgtggggcaaccgccacttgatttgccgggcatcgatactgttgaactggctcagatcgtattgccggaagcaccgagctatcgattacaagacctcacacagttactcgccatcgaacatgacaatcctcatcaagctgacagcgatgccttggtaacggctaaattattcttaaaattaatggcacggctgaagaccctgccattagttaccctagaacgtcttagtgcgttaggcgcgggcttgttacgtcaaacaggggatttcttcacagcgattgccgagcagatgcatgcgcaatcgagaccgctgccgaacgatctcttaattcgtgaaaacattgccctacgaaaaccagccgaggaatcatttaaaatctatccgggatctaattttgcggctgattatccagtggaagaagctgataaaaaacgattattaaaaccccacttgaaatggcgtaaagcgcaagctgccatgatggatatgattcacgataatttcgaatctgaggcacctgaaccactattaattgaagcagccaccgggttagggaagaccatcgggtatttactcccctatagttatcgtatgacgcctgaacacaaattagtggttgcaacatcgacaacgctgctacaggatcagattttaacgcaggccagaccgcttcttgaaaaattagtaggtcgccaaattaatgccgaaatcgttaagagtccgcgtcactatttggatttgcatcgctttgaattatcgctccgtttaccacataagaatcggatggtgcggttgcttcagatgaaaatcttagtttggctaacccaaacaacaacgggggatttggatgaactcaatttaacgagttaccaaacaccatttttcaataacgtgcaacaccggggactaacaagtctgcaaccacaagcgccgttttatcaagatgatttcttacgccgcctgcataagcgccagcaacaagccgaattactcgtcaccaaccacgcctacctggcagagcacgcgaatgatcaccaaacctggggtgcgcgaccatacttggtcttagatgaagcacaaaatatgattttcaatgttcaaaaaattgcgcaacaagattggtcactttcacgttggcaactttggtctcaaaaagggttgcaatatacggatccggaacaggccaataataatttagcccggcttttcccgaaaaaatcaccgcaagcccgctcgttacggttagtgcataaaaacttaaccaagttaggccgaaccatcagtgacttagagacatacctaaccacagcgtttgaactaccgcaaccagaagcgcatcaagcgtttagtgaacgttatttgaatccagatgaagtggttcaatttgtcaccgcttgtcataatcaattcgaccaactgaaccgccaactgttgaccattcaagatcattttctcgcgttgcgttactggcttgaacagcggttagaacaatatacagagggggatttggggatttggcagtcatttgaaaacgaaatcaacctattgttggcggatgttgaagcctatcaacggtttgagcaattattcattgcgacgaaaccgcaggaacaacacgcgttaatgattcagatgacacagcctaaacaacctagtcagttaccacagtttaagctccagtggcaattgctttcagctggtccgcaaatgcaacagatcctcgcgcactttgaaccagtcaccttgactggcgcaacccttgcggttaatgggcacttcgattatttgaaacgtgaacttggttttaccgaagcgcaaccactagcgactaagaaattacgcagtccattccgcttcaagcaacaggcgcgcttttttatcgctgaagatggtcctagtcaaaagaatttagcccccaatgagtaccatcatgcagttgctgaacagctattaacgttattagttggcaatccgcatcaggcgttagtcctctttaattctaatcaggcgttagaacaagtgtattatgcgcttggccgcgccggtttatcgcttgatcgtgagattcttgcccaagggattacgggtagtgcggagaaaattaccaagcgctttatgctggggcacgattcaatcttgttggcgacaagcagtttcattgctggtgttgattttccggaatcagcactggaattagtggtgcttgttcaattaccatttgatgcgccgaatgcactgcagacacgaattcgttacgctcaactttctgcccaaggaattaatccatttaaagcagaggctttacccaaagcaacgattaaactacgccaagcatttgggcgcttaatcagaacccctaacgatcgcggcgtcttcatttgtttagatccccggttattatcgacccaatatgggcaacaaatgcgccgcgcgttaccgacaagtttgccccaaaaagcagcgtcggttaaaataatccggaaattaaccgacttgttttggttaaattcccactaagattcggttttaagcgccgatagccgttattttttgctataataaggcttattcaagcgaacaaggagagaatgcagcgtgcgcaaatataagagatggctctggatattcttattgttggtaatcattggcagcatgctgatgatttatcatcaagctcgaaaacccgaagcaacggctgaaaccaaagccgttaacattgctaaaaaatacgcgaaattaaaagagcctgatgggttctacacgtatcatcgaaatgcaacatattataccgttagtggtaaagaccgtgataatcacggcatcttcgttttaatcaacgaaaaaggcaatcatgccactgtctatcgtcaaagtggtggtatttctaaaaacgatgcgttagaaaagacatggtcaactaaaaatccgcaaaaagtactgaacattaacttcggtatgtaccgcaacaagcctgtttgggaagttgtctataaaagtgacaaaggccgtctttgttatttaaccctcgattttaaaaccgggaagacgattcaattgattgaaaatatctagggttctcaattagggggctgtggttgtcagggttttgttatataataataactatcagttattttgaactgttgtaaattaaatgttgcacataaggagacagagtttatggttaaaaaaatcagtattatcgatgcaaaaaaccatgtcgatgaagaagttaaaattggcgtttggttaaccgacaaacgctcaagtgggaagatttcattcctccaattacgtgatggcactgcctttttccaaggggttgtcgttaaaagccaagtaagcgaagccgttttccaattggcaaaagatgtcaaacaagaatcaagtatgtgggtgacaggggtcattcatgaagatactcgttcacactttggttatgaaattgaaatttctgacatcgaattaattggtgacagcagcgaatacccaattacacctaaagaacatgggattgaattcttattagatcaccgtcacttatggttacgttcaaaacgcccatttgcgatcatgaaaatcagaaatgaaatcatccgcgcttcttatgaattctttaaccaagaaggcttcatcaagatggatccaccaatcttgacgggtagtgcccctgaagggacaactgaattattccacatcgaatatttcgacaacgatgcttatttaacacaaagtggtcagttatacgctgaagctggcgcaatggcctttggtaaagtcttcacttttggccctgttttccgtgctgaaaaatccaaaactcgtcgtcatttgactgagttctggatgattgaaccagaaatggccttcacaactcaagatgaaagtcttgaagtccaagaaaaatacgtggcttaccttgttcaaaacgtcattgatcactgtgcctatgaattaaaattattggaccgtgatgttgaccaattgaagaaatatactaaaacaccgtatccacgtatttcatacgataaggctgttgaaatgttacaagcagctgacttcgatattaaatggggcgatgattttggcgcaccagatgaaacttatttatcggatcaatttgaacaaccagtcttcattttgaattatccaaaagccatcaaacctttctatatgaagccacatccaacacgtgatgatgtttacttatgtgctgatttattggcaccagaaggttatggtgaaattatcggtggtagtgaacgtgaaactgactttgataaattagaagctgaaattaaagcaatgggcttagaccttgaagaatatcaatggtacttagacttacgtcgttacggatcagtgccacattctggtttcggattaggtctagaacgggccattacatggatctgtggtatcgatcatttacgtgaaacaattccattcccaagaatgattaacagaatcaaaccataaagagtactgactcgaacgagttgactttgaggattaacagcaaaacgggcattatggcgcttcacatccatggtgcccgttttacagttaaccggaaaaggcagttcgaagaagcacgtttcaaatagagtgcgttgtagctggttaggttctgagcattaacgttggttggcgaataatcgatgcaatcgattatttgacaatcattgttaagcgcaggaacctagctacaaaagcacgtttgaattagagtgcgttgaaagtggttagttctcgagcatttgtctagtctagtgaatgagcgacgcaagtcgatcgtttgctggacgtagcaaagcaccgaggactactttcaaaagcatgtttcaaatcagagtgctgactcaaacgagttggctttgaggattaactaaagcgccgtgaaccgaaatcaggttctcggcgcttttttatttgtctaaaattggttacaatagaactaatgaaacttttagaaaagaaggctagaatatgaacgaacttaccgcgtttttacaaggcggccaattgagtgtctctcgactgttactgcatcactatcaaacgctcaagatgtcttctgaagaattagtggtttacttacagctcagtgattttgccagtcaaaacaatgactttcccgatttagctgtgattggtgaacgcatgggaattgaatccagccaaatttacgcattgattcatcaacttttacagaaaaaactaattacccttaaatcatctgtcaatgaacaaggtcaggctgaagaccattacgatctcacaccagccttaactaaattgagcgtgctagccgttcaagacgcacaagtcactcaacaagcactagacggtaaccaacggagtgcggtctttaaccaagttgaacaagctcttggccgcccattatcgccattggaatctgagattgttgccaactggttagatttagatcattatcaaccagaattgattcaattagccgtgcgagaagccgttttaaatcaagtctattccttgaagtatgttgataagattttgctcaactggcagaaacaaaatattactgataaagaatccctacaagcttaccaaaaggcccatccaagacgttaatcgaataggagatgaagcggatgttatcaaaagccaaaacacagtgggccatgcaccaactatacaaattaattccagatgcgcagggcgcattagttgctgattcaccgtttcaattgttgattgcggtgatgcttagcgcacaagccaccgacgtttccgtcaataaggtcaccccacaactatttgctgatttcccgacaccagctagtttcgcgaatgcagagattgccgatattgaagctgatattcattcaatcgggttatatcataataaagctaaacacattaaaacatgctgccagcaactaatggcagattttggtggggaagtgccgcgcacacatgccgaattggaacaacttgctggtgttggccgtaagaccgcgaatgtcgttttaggtgacgcctttaacgtcccatcatttgccgtcgatacgcatgtcactcggattgccaaacggctcaaaatcagtgcacaggatgcctcggtgatccagattgaaaaggactttcaagcgaagcttcctaagaaaacatgggttcaagcgcaccacacactcattctttttgggcggcgagtctgtacggcacgtaagccgcattgcgatgagtgtcccttattaaggatttgccaagcaggccaacaatttcttgaagatcgtggttaaaaaacgcaaaaaaagcaccgttcagccaacgtttatcgttgaactgaacggtgcttcttttagttagttggcgctgctggtgtttgtgtcgtcgaccccgttcctggattagttgttgccggaggggttgaggtcgaaggttgcgattgtgaactttcagttggggtgcttgaagatgaggtctccggcacactggaagattcacttggtgtttcaaccacgctacttgagctagaaatttcactgcttgagctgaccggtgcttctgagctagagtagagtacactacttgaagaagatcgactgcttgaagaacttggaatggtcgtcgtccctttaatatagagttctcgtacgccagccacgtttttagcaaccacgttacttggcattgaccaatctgagttggttgcgttttgagcgaggtaggccatcattgctttatagatataagcggcgacgttccgctcacccattgttaatccatttttaagtggttcatcgtatccagtccaaaccgtcactgaatagttcttggtataaccggcaaaccagctatccttcgctaaagttgggtttaacccagatttggcaatttcttcgctagaataatcggttgtcccagtcttaccagcttgatgaagccctggaatttgggctaacgtcccagaaccatttttaataacatcttttaacatatcagtaatcatgtaggccgttgaactcttcatagcctgtgtgccatcagaatcataattatgcgtaatcccatcggctgtttcgactttatggatataagttggtgcatagtaagttccaccgtttgcgaaggcgccatatgcggcagcttcatcaacagttgaaacattcccaccaatcccataagaaagaccagtatcagctggcacgttaatgcctaagcctttcacgaattcacgggctttagtcatgccaacagcttctaacagttcgatggctgggacgtttcgtgagttggcaagcgcattacgcgcggtaattgtaccgagataacggccatcaaagttatgcaattgaatattggttccaggataagtgtaagggacatcttgtagtttctgtgcggttgagtagtcaagatattcgatagctggaccgtaatccattaatggtttcattgatgacccattacttcggccagattgcacggcccggttataaccgagctgcacatcaccagttttacgaccaccaatcatcgcaacaattcgaccgttattaggatctgtaattgaaactgctgtttgtagctgatcatctgggaatggaatactgctatcattattgacgatatcgtataacttacgttgcgcgtccatattgatattggtgtagactttcaaaccagccgtgtacggatcatagccttttttcttcaagtcggcgaggacttccttgacgtaagcgtcggttgctttagaatccgttgaactattcgctactgtttgttgatccactaagccggtattaattgggacttgtttagcttcggcagcttcagttgctgtaatcttattgttccgcaaaagcgcatcaagaactaaatcacggcgcttcttcgctaaatcagggtggaggtacggatcgtaattacttggcgattgcggcatacccgcaatcaatgccagttgtggcaaacttaattccttcaacgacttgccataataatacttagcagccgtccccataccattgaccccgttattcaggtacactttgttcatataatactctaagatttggtcttttgaatattgacgttcgacttgaacggcaagccacgcttcttgtgcttttcgtctgaaagtctgatcgctgtttttcgttgagaatttagacagtttaatcaattgttgggttaaagtactcccaccttgtaagcccagcggtgatttaccagtaatattggcgactgcagcagacgcaattcggattggatcaatcccgaatttttctttatagaaacgacgatcttcaatagagactactgcatcttttaatgtttgcgggatttgatcactcttgacataactccgattttcgccaccaattgttttgaaaggtttcccttgatcatcgtatagaattgtcgcattcggactttgcaggtccgcttgcgttaggtttggtgtatctttaacatagtaggcaaacaaaccaatcccagccacgaaagccactacaatcagtagtaacagccattttagaattcttaaaaagaggggccggcgtttcttattagcgggttttgcttcagctttgtgccttgcaactcgcgaattattattgtttcgattatcggacattgttctttaaactcctttatttgaccgctttaataactgatctacggcatctaagtagggaataattggattaagttggtacttaatctcaatcccattgtcaatcacatcactgagtgaaatcgattttcgtgcaccatcaacttgcgcgtcccagcggctaatcagttctgttgcgggatacaagaatagccgttgtagcgggacaaatttcataatgacaaagcagatgccaccttgattcaagcaggctctgaaatgttcaatctgatgttgatggaagttccgaaacggaaacgcggttttattcttcgtttccttcgcttcaaaatcgacgtaacggccctgataaatcccattatagtcagttgttgaggcttgtttaaaataagcttctttaataaccgcttggctgcgggcagggtagtcgaccttcacaatctgaattggcgttggtttcttatacacgacagccgttgcatgtaatcgataatactgattactatcattgagttcttcttccaacgtcatgccgcgtttaccaaataacgttgttgcttctggttgccgggcttgctttttagttggttttgtctcattatttgtataaggctgtccgttaggataatgaaaggccattgaaaatcacactcctgtttcactattatagcaatgtttagtttaattgaaaatcatttgggagggacctgacttgaaacgactatgggtgagcggctatcgaagctatgaactcggtgtttttggcgaaactgacgagaaacttaaagtaattaaatattccttaaaaaagcagttaacacaatatttagatgatgggctcgagtgggtgatcactggtggccaaatggggattgaacagtggagtctgcaagttgctattgaactaaaaacggactatccggatttaaaattggcgatgatgttgccgtttaatgattttggtcaacaatggaacgaaaataaccaagctcaattgagtcagctcaaagcgcgagtcgatttttgcgaaccagtgattaacgcaccgtattctggaccgcaacaattgcgccagtatcaacaattcatgctgacccatacggatggtcaactattatactatgatcgtgaatcaccgggcaaaccagaatatgattatcatgcagcccgccaatatcaagaccaacaagattatccgattaacttggtcgattttttcgaactacaagatatcgcgactgagttagcggaattagatcagcaagagttttaattatccgataactttgctataatgggaatcatagtacatttattctaaatgaggtgtcaaaatggacaatcaaattgaaatcgaattgaacccaactgatatattgaaaaaagaatttaaaacaaaaatgcggggctatgaacctgaagaagtcgatggttaccttgatttagttattaaagactatcaaacttatcaagaagcaatcgatcggctaacggcggaaaatgcccgcttattcaagaaggttgacgaattaaaccgccaactcagcgcttctgataacgtgaaggaaagtgcaccacaacaatcttcagtagcaaccaactatgatattttgaaacgcttatcaaaccttgaacgccacgtgttcggtgctaagttaagtgaacaaaatcaagcgccacagacaagagttcaaaatcattcacaatttgacgagacaaatctttaatcatgtgctatacttataaacgttgattcaacatttgtaaatcttgagtaatcgcggtctacatcggtaggctgaggaaggtccatgcccgcacaggctgagatgcttgtagtgttcgtgcctggcccaataagccagggtaccttaacggtaacggcggaaaaagcgctaaaacttcggtcatgcgtgaatatccttaaatagtgccacagtgacggagcgtccttggaaacttggacggtggaacgaggtaaaccccgcgagcgagtaacccaaactttggtaggggcgtctcatttatggaaatgaactaaaaatgagagttcgtaagaacagatagatgattactgaaggaactttcttcctggggaagttctggaacaaaacatggcctataaaggtttacaatcaggtggcttgggcttttgcccaagctctttttatttaaaaaataatttcctaaggggatctttaaaaacatgacttaccaactatacgcaacaatggcgagtgggattgaatccattacggccaaagaattacaaaatctcggttatgaaacacgttcagataatggccgagtgtatttcgaaggcgatgtggcagatattgcaaaaaccaatctctggttacgcagtgctgatcgggtgaaaatcgcgattggtcaatttgaggccaaaaccttcgatgacctttttgaacaagtgaaagctttgccatgggacaagttcctgccattagacgccgcttttccagttgctggtcgctcagtccgttcaacgctccatagcgaaccagacgtgcaagccatcactaaaaaagcgattgttgataagttaagtactgtctatcaccgccgaacacgtttagctgaaacaggcgcaacgtatccgcttgaagtcagcatcctaaaagatgtcgtgacgatcagcttagatacaactggtcctagtttattcaagcggggctaccgccttgaaaaaggggaagccccattgaaggaaaacttcgcggcatccttaattcttttaagccgttggcaacctgatatgccatttgttgatccaacgactggttctgggaccattgcgatcgaagcagctttaattggtcacaacattgcacctggtatgcatcgtaagtttgcctttgaagacttcgattggatcgatgcttctgttttagaaaatgccaaagccgaagcgaaagcagccgaaaaagaccaaccacttgaaatttttggttatgatatcgatcaaaacatgattgatatcgctaagttgaatgcaaacgaagctggtgttttacatgatatccagttcaaacaactcgctgttaaagatttcaagacagatttaaccaacggggtcatcatcgccaaccctccttacgggaaacgattaagcgaccaaacacaagcccgtgctttgtataaagaaatgggtgatacctatcggtcattgaagacttggagtaagtatattttaacaagtgacttacaattccaagaatcattcgggcaacgcgcaactaaacgccggaaattgtataatggtcggattcaaactgatttattccaatactggggtcgtccagtatggccacgtgcagaaaaagaataaaattttttataaagcattgccgttttcagtcggtaatgcttttttatttgctgaaaatcccttataataaagattacttcaataataaggtgagggatcgacttgacagtcattttagcagcagaaacaattcctgaacaacacgtcaaagcactaactgcaaaagatttaacaatcatcgctttagctgatttaaaaccaagtcaactgggtagtattgagattatgtttggttggaataaagatgtaggcccgaaaattttagcagagcccggtaatcaattaaaatggattcagaccgcaagctcaggggttgattatttaccactagccacgttagctaagcaaggggtactggtatcaaacgcacgcgggatgcacgcaaaaccaatcgcacagacggcattaagttacatattacactttacccgtgggatttatcagagcttacccgcacaagcagcgcatcaatgggagcatcatgctattggtgaacaaatgacaaatttggaacaccgcacactcctcatttttggaacaggtcaaattggtgaggaaattgcaaagtatgcccacgtcatggggatgcacacaatcggcgttaatcggcacgggaaacccgttgccaattttgatcagattctaaccgacacggattacgaacaagcattgccacaagcagacttcgtgattaatgtgatgccattaacactggtcaccaatcggttcttcgacaccaccttttttacgcaactccatcgaggggcttacttcttcaatttagggcgcggcgcttcagtcgacgaagcagctttgatgcactatctacaatccggtcatttggcaggagcagcaatcgatgttgcccaaaacgaaccattaccaagtgattcaccattatgggccacaccaaacctgattatcacgccacatatttcaggttacatcgctgatatccatgaacggctcttcaaaattttcgatcaaaatttacccagttatttagacaaaggtgaattacccgtcaatccggtagacttgtcagccggctattaaaaaaacagcgttaggactttttgtcttaacgctgttttttttgtgactttaaggggcctttttgaattcgcattttaagcaagtttcgcgaccacttgtccactcactaatctgaaacgtccttaaaatgcgcctctggtgattgatcgtttataaacgtgattagaccgtgatttagccatcaatagcctttaatgtgtttgagcgcattcttttggtagaaagaatgcgctcggaatccctttaaatcaacgataatcaaaggtgcaaaataccaccgcatggtttataatgatatagagaaaaagaatgcggtcaaaaaggcggaaaaaacatgcggaaatcgcgcactaaaaaaggcaaaaaattaaatgttcaacctttacggacaaaagatgagattgaagacatgaaagtcatcttgcgccattcacaaatgggtagtcgcaattatttattatttttactcggcattaatactggcttacgctgttctgatattgtgcagttaaaagtcagagatgtgatcgaagacaatcccgtgattgttgaacaaaaaacgggtaagtggcgccaaattagtttggcgagtttacgcccatacatcagtccctatattcaaaataatgaattgctaggcaatgattggttgtttcctagccgcgtcggcgataaccacatcaccgtcaacggtgtttaccgcatgttgactgaagcaggtaagaaacttgggcgtaatgatattggtacccatacgatgcgcaaaacttacggctactggttctacaaacaattcggggacgtgcggtcattgatgattgattttggtcattcaacgcaagaaacgacgctccattatattgggattacccaagatgaagtgttaagcaagaaacaacaactggcgattggactttaaaaaaagcttgcattaaagtgaggtctaaggtgtatagtaaagacaatataataggaagagataggagattatagttatgaaaacagctacttttatgggtcctggtcaaatgaccattaccgaagcaccaaaaccaacgattgaaaagccaaccgatgcggtcgtgcgcattatccgcgcgtgcgtctgtggttctgatttatggtggtatcgtgggatttcaaaacgagaagtaggcggtttcaccggtcacgaagcaattggcatcgttgatgctgttgggactgacgtacaaaatgttagtgtcggtgattttgtgatcgtgccatttacccatggttgtggccactgtgccgcttgtttaaacggttttgatggcgattgtaccaaccgcgagaataatcctggtggctaccaagccgaatatctccgttatcacaatgcaaactggggcctcgttaaagttcctggccaaccaagcgattactctgatgaaatgctgaataatctattgacgctttcagacgtcatggcaaccggctatcacgctgccgtgtccgctgaagtgaaacccggtgacacagtcgttgtcataggtgatggcgccgttggtttatgtggtgtgattggcgccaaattactcggtgcgaaacggattatcgcgatgagtcgtcatgcggaccggcaaaaattagcccttgaattcggcgcaacagacattgttgctgaacgcggtgacgaaggggtcgcaaaagtgatggcgttaaccgataacgctggggccaacgccgtcttagaatgtgtcgggaccgaacaatccgtcaccactgccgtcgccgttgctggcgcaggggctgtcattggtcgtgtcggcattccccaaaaagcagagatgaacaccaatgccttattccggaagaacatcggtttgcgtgggggaattgctgccgtaacgactcatgatcgcgctcgtttattggatgctgttttaaagggtgccattaatcctggtaaagtctttacacaacgctttaccttagatgatattcaagccgcttatgaagcaatggatcaacgcaaagcgattaaatcattattaatcatcgctgaataatataaaaagtgccgcagaacaggatttttcctgattctgcggcatttttttaatgggcaataagacttaatagataaccgccaagacagccgaagatcagactgagcaaactcccaatgagataatattcggcgaagtggtgttcgttggattcaatggctttaaagcgggtcagcgccttaatcgccacaatcacagcaatactcgcaacattgtgcgtgtaaaacaagattaagatggcaaaccgttctaaatgaccaatatgccgacccagttttgcaccatctggcaggcgatccatgtttaaatccagtccttttaaatagaagctaatgaaataatcggcaaataataacgtgctcaaaacaatactggccgccaataataatcggttcacatggttaaacgcccattgctggccgaggaacatgctcacaaggccgatcactattaaatggagtgcttgatcgatggtataactcatcactggtacgcgattgctggttaaatgtagctgtgcttttaaaagtggttggctattttgcttaaatagatcaatgagccaatgactcatcacaatgatgactaatccgattagtaacggttgccaatgtggccaagtaggtggtgccattaaccaaccgccaccccataaaataagcactaacgggacttgtgtcagtgcgtgcttgcataatggccaccatttcacaccgagtttcgttgaacgtttgcattgggccatctgatcagattgaaagacaaagtcgcagccaatatgactaagcaagaaaagcgcaaagaggttcattcgattgcctccttaaaggtcatcagttgcgcgcgcaacgttgccagggtctgttcaatcaagggatactgaatctgattcagtaagcgactgactttactagaggctaatgcacgccctttttgatcactgtagtctagttcataggaagcaacgccgtatttggtccacaacaattccgctaattcatagcgtttcaatgttggttgaagcacgatttcagcaaaagcgtccttgcgcaactgcgtattcaagagttgctcataaattaaataaaagagggcattaatcccatttgcggctggttgatctgccactaattgaaattgaaaggccgtcgtcataaagggataaccttgtgctaattcagcaccttgacgcaacagtttggcttgatctgctgcggcgagggcgttcacaattgctgtcccgttgacccgattgatatcctgatagtcacttggactcggcgtagtcatcgttcctaagccaaccccaaaataaaaagtgggctccgccagccccgcaaaatgtgtctgccagaaagtttgaaaagcgtcactctttaaataggcattacaaaagggatagacatcaacaatctgtgcctggtcatccgctgaaaaaccgcccaatagaccatcaccatccttaattgcaaatggtgttaataacgctggaaaatggtgattcaacgtgtcggcgaagtgttgcaataactggagtgtctgtgcttgttccgtaaaacgggtgcggctatccgctaaatcaatgaaacaataggctgtctgcatcgttctcatcctctctgaaaacatttgattataagtacataataggtgaatatgaacgaataatcaaatgtttttgaggagcggtttacatttcgcagcctacgtattatagttaactacataagtaactaaccaattaacgaaacggaggtgttccggatgctttttgaatttaataatgatgcaccactctaccggcagattgccgaacaaattgaagagggtatttttactggggtctttccacctggtagtcaagtcccatcgacaactgaaatttccagacaattcaatatcaatccagccacggtactcaaagggatgaatcaactcgttaccagcggcttaatcgaaaagaaaaggggactcggcatgttcgtcacatcaagcgcacccgcacagatcactgaaaaacggcaatctgaattttttgaacactatgttgcccaatttatcactgaagcacaacaattaaacctaaccaaagacgacctaattgcactgattgaaaggggttatgaccatgcctaatttacaaaccacacaactgattaaacaatttgggaaacaggtcgtcctcgacgacatcaacttaacacttaaacccaatacaatttacggcttactcggccgcaatggggtgggtaagagtaccttattaagtattctagccaatcatcaaactgcatccctaggtgagattaaatggggcgatacggtcttaaccggtcgcgatcatccgttacaaacaatttacttgatgtcggaaatcaatctctttaataaagatgacaaattgcggaccattattaaaaataccgccttactgcaaggttcatttgatcatgcactcgccaaagaaatgctgactgcatttgatttgaatccaaaaaagaaactcaatcagctttcaactgggtaccgcacgatttttaaaacaattgttgcgctttgtgtgccggcggaatatgttttcctcgatgaaccagtcttaggcttagatgctaactaccgcagcctcttataccgctacattttacaggcctatgaaagtcggccacggacatttgtcgttgcgacccatatcatcgaagaaattgcgaccttagtcgaacacgtcttggtcttgaacgacgctcaattaattgtcgatgatgatttggaaaccgtcctcgccaagagttaccgtgtcagtggcccggaagaacttgttcgcgagtactgtaccgacttaaacgtcttagattcccagcaaatggggaccttatacacggtttatctttatgacgtcttaccagaagaacgggttattccagatcgtctaacgattgaccatatcgatctacaagaaactttcattaaattaacgaacaaaggaagtgaagcacatgtttaatgcaatgatgcggtaccgcctgaccgccatttggaaaacactggcggggggtgccatcggatttttcggcgggatggttgtcgttgctttaattttctcaaagaatttagacttaggtgattttggccttgcaattgtgacaggtttcttattcctgagtcaaatcacattagtcgttcaatcttttacaaccactcgaaaaacttttaattttgccattttgaatgggattccgagaaagattagcttcctaacacaattaatcagtttattcagcagtcaactggtcacctttgcttgtttatatccaatcgcgattcataaccaaatattcgcgggtattaaagctaacctgttagacccccacattatcgtggcattaattctcgtcgtatggacgttcatggcccagggtttagcgatcagtagtttcattactttatttgaacataaagcttgggttttcctatttgcagcatggttaattatctccacgatttatgaacgttatatcacaccaatcattacgcggatgattccggattggaccgattatttcttcgttaatttcgaacaagtgaatgtcgtatcggcgattaaaattgccttcgatcagccaactttctggattagcaccttgaccagtattgttgcaccgcttatcatcgctggcatttgccaacacttcatgcaaactagacgaatcacgtttagattgagaaaaatagcgcgctagtcaattgtctcgcctttgtgcgagactttttacgtggttgcaatttcagccttaattgttatactaataactattctatttccctaggaggttgtctcatgctcttatccccattatttgaatgtgatgtgccaacaatccgctaatttcgtgcattaaacacaaattggaggattcacacatgacaatcactaaacaagcaaacttagaccaagcacaattggtcaccgcaacattctcattcacaaatgctaaaaaagatgccgcgttctgggacacaactttaacgccgttgctcaacgaaatcgaagcgaatttatcgctcgaacaaattcgtgagttgcccaacatcatcgcgacgaaaaaaacgtataaggcaatcggacttgatgcaacacggcaccgaccatcttcggatagcttattacggcgcgttgttaaaggacaggggctctatcaaattaatgcactggttgatgtgaataactatctatccctgaagttacaattaccgattggcagttacgacttagctaaaatcgacggcccaatcagttatcaagtcgctgcagaaggggacgagtacgccggaattggtaaaggggcgatcaacatcagtcacttcccaattttagtcgatcaacagggggcgtttggcagtccaatttcggattccacacgcgcaatgattgcccctgaaacgacagaagcgatgctcgttgtttatgctttcggacaatcatcagctcaattagtggtaattgaacaaacggttaaaacagtgcttcaaacagcttttaacccagaaacaatcacaactgaaatcatcgcataaaatcaaaaaggagctgagacaaaagtaaattttgtctcagctcctttttgatagccgaacttttatagtccaaacgtgttctgtaactcatatccttgcggttaaccctcaggggatcaccgcgttccgtcacacactcttttttattgtgctaataattcaactaattctgtttttggaatccctgtgaagtaggacgtggtgtcgattggttcgagagtgcttgctaaatgttcacggtcataaaccgtcccgactaatttttcagccaattgattagcatcaccggaaccaaagaagtcgccgtagaacttgacgttggcaatcttcccattttcgattaacaagcgcgcatcaatcgtcccgaaatcgaagtgtttgcgtttttgaaccgttgatttaggtgacttgccatagacccagtcccaattgctatagagatcgttaaaaatcttatcgatggcttgttcgtctgcggccgttaattgatattcgcggtcggcaatatcagctagttgatcggcgtgcatcaagttcagtaataagacgtctctgaactcttctgtcgacatgttttggtattcagggtcaacgtgcccttttaggtttgtgacgcgttgtcgaatcgatttaatgccttttgacgcaatcttatctgcagggacattcaaggcttgggtcaaaacatctaaatcaacatcccatgaaagggtgccgtgggagaaggttttaccattcttggtgtacatcgcgttccctgagaattttttaccgtccactaacatatcattgcgaccagaaacttcagccgttgtggcgcccatttgatggagtgcatcgacgattggttgcgtgaaggatttgaaatcaccgaattgttcagaatctgcgttcaccacgaaactgaaacaaaggttaccgagatcttgataaatcccaccgccaccagacaaccggcgtgtgaccgcaatatcatggtcttccacgtatttttgattgatttcttcatacgtattttggttgcggcccacgataatgcatggtttctcaatgtagaatagtaagagtggttcatcgaaatttttttgattcattaaatattgttcggttgccaagtttcggcgaatatcatttgacttcatcacaacgtaatacatcagcataaaacccctttcataatcactacggatttattatactacatatcgcatcaaccagtgtactgaagcattaaaaaagcggtccccgataaaagggggccgcaggattaatcatcgctatattccaaaatatcaccaggttggcagtctaatacgcgacataacttctcgagcgtcgaaaagcgaattgctttggctttaccggtttttaaattcgaaaggttcgcaatcgtaatatcgacctgttcagcaagcgccgtgacactcattttccgttgagcgagaattacgtctaaattcacacgaatggccattgaattcctccttagaccgttaaatcgacttcagattgaaaggcgattgcacttttaaaaagatcttcaacaatctgcatcaaaatgaggattgcaaacggaatgaagaccaggcctaaccccagcaacatcaagcctggtgcatcttcgagttgcgtaatccggtagaaaaaggggagggcaaaaagggccgtcaaactcgcaaccaaaatcgcttttctaattgctgatacatatcgtagcgtctgagggagaaaaacttgatggtgctcaattaagcggagaatctgcgccaacttgattaatgcaaaccaaatactcgccgtcacaccatacgcagcaatcgccaacatccagattgtcgctgggtattctaagtgtttcgtggtcacaatttggatcgtcactaacaaacttaacagaccaaataccgccgcaattccgagtaatgccattctaagtagccatttttttaacattcatctgatacctcgtttttaagaatagttttattataatcgttttttattgaaaaacaattaatttttatcgtttttcgataaaacttaatatttaagactagtcaaagtaggcgtaactgttataattatcggggtaaaacctttttcgtcattgcgcatcaaccgaatgaacaactgaatacgaaaaataagctcaaaacgtttttgagtcaaacaactacgcaaacactagcgcacaattcctatcaaaaactggacgaagacggcttcatttttattgccgataatcagtttaaaccacaccaagactttggctatgggatggtcacagtaggcattccgcgcgacttcacactgcaagccattgttgcgacggccaatctaaacgacccactctacaatcgctatccaatttatcaaattcaatgatcagggagaaaacaatcactatgaaaaaaataatgcctgtcttcattttattactatctatcacaatgttttttatgactggttgcaatcgttccattgaaacacacacaccacccaaaacacagactaaaaaaagggactagtttacctaaacacggaacaatcagattaacaactgcgactcatttttgaatcgcatgccacatttgcgtctgggctcttggatccagatcagtggtaggttcatcgagaaagaggatccttggcttgccaactaagctgaccgctaagtccaaccgtcgccgcatcccacctgaaaaagtcgccaatgtttgatccgctgattggtccaaatcaaagtccgtcagtaactcgttagctcgggttcgactcgctttggcactgagcccatttaaccgcccaaataagcggagattctcgcgcgcacttaagtcttgatcgattgccgctgtttgattggtgacactaaactgttggcgcacttggcggctttgtgttatcgtatcaaagccattaatgtgattgtgccactatctggtcgtaggagggtggtcatcatttttaagagcgttgttttcccggcaccattgggcactaataatgcgaaaatctcacctttagaaacggctagcgaaacgaaacgcaccacttttttggtcccaaatgctttttgaatattgtttacttcaatgacatgctcactgcacataatattgcctcctcatttaataatcaggtcacatgattaatttatatagtaaggtcacctgattaaaatgtcaaggattgctactcttagattttggaatggtgtatactaattaaaacagcgaagggaagatgacgtatggcaaagagtgtcaaggccgaattggtcgccggaaaattagctgaatatgaacaactcagtaagatctacgatgatatcgttaaacaagcacgcccgcatttaatcgtcgaaggccaggggaagattctattggcacttgctgatgaagatcacttatcgcaacgtgaactagcaacgcgtttgggaatgtcacctcaatcaaccagtgaatttgtcgctaaactcgctaaacgcgagctggtgacgttaagtaagctcccaagtgatcgccgggttaatttagttaacttaacggatgccggtcgccaagaaattgaaactgccaatcaagaggtgccaccgtttgtgaacgccttgaccgaggcagaactcgaccagttagtgccactactcaacaagattacaacggcgatgtatgccgatattgatgcctcaaatccgacgttgggcgttaagtttcataaattattggccggacgatatctgaaacaatttaaaaaataaccaaaaaaatagcgcgtctcacttaaattagtggggcgcgctattgcatttaattaatcaaagtcgtaatcactatcttccatcgcttccacattccctaagcgataaccattcccaacttgggagaagaaatcgtggttggcagttgaagtcgacatcccattcaagatcacggggttcacatcttcagcactatctgggaagagggcgccttgaccgaggttcattaaggctttgttggcgttataacggaggtaagttaatacttcttctgtccaaccagtgccatcataaacttcgtgggtgtatttttcttcgttggcatataagtcgtacagtaaatcatacatccagttttgtaattcttcttgttctgacttatccaattcattgaaggctaattggaacttatagccgatgtaagtcccatggactgattcatcacggataatcaatttaatgatttcagcaacgttggccaacttattgttccctaagtaatagagtggggtatagaaaccagaataaaagaggaaggtttctaaaaagacgctggcaattttttgttgcaagggtgtgccgttttgatagatatcgttaatcttgttggctttgtattgcaagaattcatttgtgttggtccagtcgaagatttcatcaatttcagttggtgtgtttaacgttgaaaaaatggatgaataactcttcgcatgcacggattccatgaattgaatgttgtttaaaacggcttcttcatgttgggtgcggatattggcttttaagctggccatcccatcttgtgattgcagcgtatcaagtagggttaagccgccaaagacgtgcccgacgatccatttttcgttgtctggtaaactgcgccagtcatctaagtcattggaaaggggaatccgcgtatctaaccaaaattgttcggttaatttttcccaagttgctttatcaatttgatcttcaacttggttccagttaattgcaatataattttctgccatgttcatgaactccttttaacgtgcttcttttttaggtatgtaggccagctgacgagcagctggagtggagatttagtgtttgctttgaaacgtgcttttcaagctaactttctgcgcttagcccagtgaatcaaatcatcgactacttcgctaattcgcttccctatgctaatgctcaaaatataaacgcctgccgtcgcactctgttttgaaacgtgctttttgaaactgacttctgcgcttagttacactcgtcaaacaactgcttatagcagttattcgccgagttagactaatgctcaaagtcaaaccgtttcaaacgcactctagattacacaactttcgcatgcgtttgcgccgacttcactttcgtcgtctgtgtaagtccggatgtagtagattgatttaatccctttgtggtgggcgtagtttcttaagatgtttaagtcccgggtggtcattttgtcagtccggccgtttttccattcgtaaaggcctactggaatcgttgaacgcatgaagagcgtcatactcatcccttggtcgacatgtttttgtgctgctgcgtagatgtcgataactttacgcatgtcaatgtcataagctgattcataatatggcatagtgtcgtttgaaagacctggggcagggtagtagattgtcccaattttcttttcttgccgatcttcaatccggttaacaatcggttgtaagctggcagaagtatcgttgatgtatgaaattgaaccgtttggtgcaacggctaagcggttttgatggtataaaccgtcttgcatgatggctagttttaaagcttcccaatcggcttttgtgggaatcatgatgtctttgaagattgccttgactttgtccgtcttaggggcccagtcttcagtgacgtattgatcgaagtaactaccatcagcatacttactcttttcaaagttggcaaaggtcatctgacgttccttagcaatcttatttgaagcaacaagtgtccagtagtttaagagcatgaaataattactggtaaagtcgattgattcttctgacccatacatcatgtggttcttggcaaagaaggtatgcagacccatgccacctaaaccaatggtgtgggccaattcgttcccatgagccacagaagggaccacatcaatatcagaatgatctgtgacgtaggttaaagcacgcaccatggcttcgatagaaccaccaaagtcaggtgacgtcatcatgttcggaatattcgttgaacccaggttacaactgatatccgtccctaacacgtcatattcttggcggttattaatttgtgacggggtttgcacttggaggacttcagaacagaggttactcatgatgatcttcccatcaattgggttcgcagcattggctgtgtccacattgacgatgtaaggataacctgattcttgttgcaatttactaatttcattttctaaatcacgggctttaattttggttttcttgatgttatcgttggcgattaagttgtcatattctttggtgatgtcaacatatgagaaaggtacgccgtattctttttcaacaccgtaagggctgaataaatacatatcagcatcagctttcaccaattcatagaacttgtcggggacgactaagcctaatgagagggtctttaaacgatatttttcgtctgcattttcttttttagcacctaagaaagcaatcacatctggatggaaggcgtttaaataaaccacgccggcgccttgccgttgacctaattggtttgagtatgagaaagaatcctccaataacttcatgacagggaggacaccacttgctgcaccgtcgatgcctttgattggatcgccagctccacggaggttcgacaagctaatcccaaccccgccaccaatccgtgataattcaagtgccgagttaatcgtccgaccaattgaattcatatcatcggttgtttggagtaagaaacatgaaactaattcaccacgccgtgaacgcccagcattcaaaaacgatggtgttgccggttgataacgttggtggatcatttcatccgctagttgcagcgcaagggtttgatcaccatctgcgaagtagagagcattcacaaaaacgcgatctttaaaatcttcaagataaaagccattgtcgtttgtttttaatgcgtattgcgcatagaacttataagcagccataaatgacttgaagtggaagtcttggtcctttaaatattgattcaattcttccatgaatgaaagagaataagccttcaaaaaatctgcttcataataattttccgcgactaaataatctagacggtcttgaagtgatttaaacgtcaccatattgggttgtacgttttgttccaaaaaggcatcgagtgcttcttgatccttttgtaatggaatttgaccattcactggaatattaatttggttattcaattcatagtatgttacatcttcggttttaatctcttttaaagacatccttgccaccactttctagtcatattagctgttttagggtttaaaaaaagtgaagaccaactctttagtaatcaagagtcggcctcacccgttaaaactgggaatgcatggtgcttaaatcgccaatttttgcaattccgctggtctaaaacctgagaagctttctaggccatccgcttctaaaacgggaacggcttggaaaccttgttccttcaagtaatcaatatattgtggttcgtcattgatgttatgttcaacaaaaggaacgttgtgcgtttctaaaaagtgtttcgtcatccggcattgtgggcagccgttcttagtatataatgtgatatttgccataatcgttaactcccttgtatttctcttatcgataaaaatagtataccgttttgaaatggaagatgcaatcaataaacaccacatattgtagataaaacaaaaaacgaccactaattatagtggtcgtttacgaatgttcatttgattgtcttgggcaacgtcctgtacttaagttaaacatatttatgggtaaagtcaatccctgctaatgcgcaaaatttttcaaaagcacgccggacaaagcttaacagattttaaaaaattttttagattggggttaatttaatattgcaccatcataaaaatgagttaacgaacattttataaaattggtgaaagtaaccgtgaaaatttttgtttaaatttcaaccaagttgactgttgggcgattatttcgtctgttagtagggatgctttttccatatcagcctgatagatcgcttcaagttgcgctgcaactttcggatcgtaaataaacgtattggcttcaaagttcagcttgaaactacggatatccatattggcagaacctacagtgctgatatgcccatccatgaccgccgtcttagcatgtaagaatccatcttcataccggtaaatcttaacgccagctgcatgcaagagttgactgtagtattccgttgcacggtagatgaaggggtgatccggcatgttaggcgtcatgatacgaacatccaccccggacattgccgcagtcgtcaacgcatcaataatactatcatccggaactagatagggcgtttgaatccataaacgcttcttagcggtactaatcatcttcagataaccgagtttgatttgttcatctaatttatcgggaccacttgagacaatttgcatggctgctgatccacgattttgggattggtccactgggaagagttcttccgagtaagttaacttaatcgcaggctcaacactcgcgttccagtccatcataaagcgtacttgtaaggctaacacggcattgccggtaatccgcatatgggtatcacgccaatgtccgaatttcctactccggcctagatattgatcgccaacgttaaagccaccaatataaccaatcttaccgtcaattaccacaatcttacggtgatcacggaagttcaagcgaaaatcggtaatcgtgtgttttgaactgaagaacgttcgcgcgtggccaccgacatcttcaagtgcgcgccaccatttttgcgttgcgccttgggagccccaagcatcgtagacaacgttgactgaaacgccttctttggctttttgaatcaatagttgttgtaactcattgcccaatcggtcattatagatcgtataatattcgatatgaatacttttttgagcttgtttgatgtcggcaaagagggcgtcaaactttgcttgcccgtcagtatagattttgacatggttattctttaaaacgggtgcattattaatatttaaaaagagattcaccatttcggatgcttcactggaaagcatctttttcggtaagaggtcgtttttacgattttccttacgttgaatgtcgaccaatgcgaaaagcccatcatcgatttgcgattgactttggaaaatctttttccgcgataagccccgtccggtaaacatatataggataaaaccgcccacgggtagtaaaattaagactagcagccacgcccaggtggccgcaatatcgcggggctgtctcaaaattgtaataattgccaataaggcattaatgaagatgatgaatgacattatttctgtaactaaaaccatatcgtactcctccaaaattctagcgttgcttattattttactaaaatcacgctcaaagcgctagttaagcctatcaacagtcagttaaatgaggtaatccctgttgggccagatggtgcgccccctgattctgacgctctggaatccattggtggatgaccattgaatagggcgcctcaagtgctagaatccggtcgacggcagcttgataatgtttagcataccgcttttctaggctctgaaagacaagcttgctgtcaacgttaatctgtagtattttcgtggtaagcccccgattggctagttgttctaagccaagaatgaccgccgcaaattctgcatcatgattggactgttctggcaaaggtgcttgtagttgatattgtcgctctggtgtcacgattaaaattcccgccgcacttggtccgggattgccacgagttgctgcgtccgtataaagtttaatcattcttaaaatttaccgcctttcactgacagcagggtcaggttaatggtatgatacaaagcgtaaaaaggagtgttctcatgcaaaagacaaccaccgcattctaccaaccaaattatgcttacttcgtgacgatttggtcttggattggcttcgtctatacattagctttaattgtacaacttgaactcatcaacttaaactggcaatcgtggggcatcggcttaattgccgtttggttgacgctatgggtcattttcgggcatcgtgtttcaatgacggcagacgtgatcacgcttaaacggccggtatttaaatataatcgaaccatcaaccgtgaaacgactacgaccattattgtccaaaaacatggtttattaattaaaaccaacgaacttgattaccaacccgaacaaatactccttagtcgcaaagccaagcaggcattcgttgaacaactgaaacaaaatggttggccaattgaagaatagttaaataaaaaagagccacgacaaacattaatcttgtcgtggctcttttttagcgtttaaacgtatttttattctgctatcttttgcacgttagctgcctgcaacccgcgggcgccttctttaatctcaaataataccggctcgtctttattcaatgatttatagccgtcggtttggattgcggtaaaatggacgaaaacctcctcgtcatctccataactgatgaagccataacctttagcattgctaaaccacttaacgattcctcgttccatcacaatccctccttgaaatgttaatcagcgtacgcgcttattttaccacgtacaaagaagtgtgtcgaagaatatcgttctttttaagcatcccatctgccaattccgtacgtaatcagctatactaggtagtatcataaataaaaaggagctgggcggtatgtcagatattcaaatagcacaggaaaatgaagctaaggagatgcagccaatcacggcaattgccgaacaagctggtttaacggccgctgatttagaacaatatggaccgtataaagcgaaggttaatttcgctgccattaatcgattgaaagaaaaagaagatggcaaactcatcttagtgacctcaatcaatcccacaccagctggagaaggtaaatcaaccgtgactgtcggtcttggcgacgctcttcgtcaactagatcaatcagccgtcattgctttacgtgaaccttcactaggccccgtcatggggatgaaaggtggcgcaactggtgggggctatgcccaagtggtaccaatggcagatattaacttacattttacaggggatatgcacgcattgaccgctgctgtgaatactttagccgccctaatcgataaccatctgcaacagggaaatgccctcaacattgatccccgccgaattatttggaaacgggcgcttgatattaatgatcgtgcattacgccaagttgtcattggacttggtggtccagtgcaagggatgccgcgccaagatggttttgacattaccgttgctagcgaattaatggccattctctgcttagcaactgacattactgacttgaagcggcgcattagccaaatcgtcattggttacacttatgatcgacaacccgtcacagttggcgagctcgaaatcaccggtgcaatcgcgatgcttttaaaagatgccctcaaaccaaacctcgtccaaacgcttgaacatacaccagccttaattcacggtggaccatttgccaatatcgcccacggctgtaacagtattttagcaacccaaacggccctaaaaatgggtgatattgcgattactgaagctggcttcggcgctgacttaggtgctgaaaagttcctagacatcaaagtcccacaacttggcaagactcctgataccatcgtgattgttgccactgttcgggcgttaaaatacaacggtggtgttgctttagctgatttaaccactgaaaatctcggtgcgttagacaaagggtttagtaacttagccaaacatattgctaatatgcaacgttacggcattcccgtagtcgttgccatcaatgagtttacaagtgataccgaagcagaggttacaatgctccaagaaaaatgtgctgaactgggtgtcaaagccgttttagctagtgtttgggcacatggtggtaaaggtggccttgatttagcccaggccgtcttagaagcactcgatcaacctaaaaacttccaaccattatatgattcaaacgccgacattcaatcgaaactaaccacaattgtcactgacatctatggcggtaaagaggttgttttcgagggcaaagctatcaaccaactgaaagaaatcgaaaaaaatggctgggaccacttaccagtctgtatcgccaaaacacaatattcactctcagacgatccaaaagcattaggcgcaccaactgatttcaccgttcacgtccgtgaattgattccaaagcttggcgcaggcttcatcgtcgcaatgaccggcacagtcctcaccatgccaggtctaccaaagaaaccagccgccctcaacatggacgtcacagaagatggcctgattagcggattattctagagtgcgtttgaaacggttagcttctgagcattaatagaatttgacgaattgccgatacaatcggcgatttggcaaatttggttaagcgcagaaagttagcttgaaaagcacgttttccaatatcctaacgcccatctcgaaaactgattgacaagtcagccgattttaaggacaatggtagattgtatgaataggaggttcccatgctcatctatatcgttttagccgcagtcattgtactcggtgaccaacttttaaaaagctggattgttgtccatgttgcctttgcagcaacccaacccgttattccgaacgtgctgagtttaacgtatgttcaaaacgatggggctgcgtggagtatcttggccggtcaacagtggtttttctacctcgtcaccattgtggccctcggggtaattggctacttattttatacctctgatcgcactgaaaaattttaccggatcggtttaacgttgctgttagccggaacacttggtaacttcatcgatcggctccaccttaagtacgtcgtagacatgttccaaatcgaatttattaatttccccatctttaacgttgcggatgttgccttaacagtaggcgtcatctgcgtctttattgctattttgttgaaagagaaagtgactcatgactgaaactaaacaattaacgattacaactgaaacaggccggattgataaggcgctcacccaattactacccgattactcacgttcacaaatccagcaatggttgaaaaaagacttggtgcaagtcaatgatcaaccttgtaagagtaaccgcaaagtcgtaacaggggatgtcgtcaccgtcaatattccagaccctgtcacgctcgacttaaccccagaagatattccgctcgatatcgtctatgaagacgatcaagtcctcgtagtcaataaaccacaagggatggtggttcatccatcagctggccacccgaatgggacattggtcaacgctttattggcgcacaccccattgtctgaaatcaacggcgtcttccggccggggattgtccatcgaattgataaagatacctctggtcttttgatggtggctaaaaccaacgaagcccacgaatctttatccgcccaactcaaagctaaggaaaacttacgtgaatatatcgcgctagtccacggcaacatcgaagaagacgaggggaccattgatgcacccattggtcgttcaaaagtcgaccggatgaaacaagcaatcgtcgaagatggccgcccagcggtcacgcattttacggtcatggaacggtttgaagacttcacattaatcaaatgtcgactagaaactgggcgcacccatcaaattcgcgttcacttagcctatattaaccggccagttgctggcgatcccgtttatggtccccgcaaaactttagctgggcatggtcagttcttacatgctgctgtattaggctttaagcacccaacgacgggcgaaatgatgcgctttgaagccccattacccgcaatcttcgagaaaactttaaccgaattacgtgaaaatcattgacaaatcaaggattctccgttaagctaggtctaacttaatagaagcctttaaaatcggtcccgtgaggccgagaaggtacggtgaaagcaccactagacgcggagtctctaactgtaacctctcgaccttatcggtttgagaggttttttgtttggaaggagtctttacgatggtcaaagaagtggtcgacagtaacacaatgaaacgggtctttactcggattacgtacgaaattatcgaacagaataaggggatttcagatctcgtcctcgtcggcattaaaacccgtggcgtgtttattgcccaacggattgcagaacgcctcgaacaattagaaggcatcgcattgcccgtcggtacactagacattacgttataccgcgatgatcaacatgatcttgatacacaaaatgaaccacagattaacgggagcgatattcccgtcgatatcacaaataagcatgtcatcttaatcgacgatgtgctttacacagggcggacgattcgggccgcgcttgacgccttaatggacttaggccggccaaagaaaatttcattggctgtcttagtcgatcgtggtcatcgtgaattaccaattcgccccgattttgtcggtaaaaatattccaaccgccctcaacgaacaaattcgcgttgcgatggaagaaattgatcaacatgatgggattaccatcgaaaaactaactaaataacgactgaaccgtttaattgtctccagagagagcaaaagggtttgtcttgaacttagtgcgcctaaaaaaaggggcctaagtccgtcaagggacacacctaccaatctgttggagcgtgtgtctttttttggttcaaaaagtcggcgacatggaggaaatacttatggctacacaatttagaaatcccgatgcggtcttagacgtcaacgaacgccccagcaccggtaaatggattggtttatccattcaacatatgtttgcaatgtttggctcaaccgttctagtgccaatcttagttggtttaaacccagggattgcgttattcagttccggggtcggcaccttaatgtacctcttgattaccaaaggcaagattccagcatacatggggtcgagtttctcattcatcgtgccaatgctcgctttgatgaaaacgactggctaccctgggattgcacaagggacaatggcggttggggcagtctacttaatcgtttcaatcttagtcagtctgattggttccgactggatcgacaaagccttaccacccattgttgtcggcccaatcgtgatggtgattggcttatcactcgctggcacagctgccaaacaagccactatcaatgcccacgggaattacgacttaaaattcttcgcagtcgctttactaacgttgttaatcaccatcggctttaatatgtatctcaaaggattcatgagcttagtccccatcttgctcggcatcattgctggctacatcatcgccgtcttgttcgggatcgtcgattttcaacccgtgatggacgccccttggtttaaagtaccagacttccaagtcccatttgtcacttacaaacccggtctgtactggggcgcgattctcagcatggcaccaattgcctttgtcacaatgaccgaacacatgggccacattatggtcttaaacaaactcaccaagcgtaacttctttaaagatcctggtcttcaccgcacgttagccggggacgggacagcctcaatcatcgccgcttttgtcggaggaccgcccgtcacaagttatggtgaaaacatcggtgtcctcgccatcaccaaagtccacagtgtctgggtcttaggtggcgccgcattcttcgccatgatcttcggcttcatcggcaaactgagcgcgttgattcaaagcatccccacacccgtaattggtgggattagcttcttactcttcggggtcatcgcctcaagcggtttgcgcgtcttaatcgacaaacaagtcgattttgataagaaacgcaacttaatgattggttcatcaatcctcgtcatcgggattggcaatgcctacttacaattaggccaataccaattctcagggctagccatcgccaccgtccttgggattgtcttaaaccttgttttaccggataaagcaaagagcgaacttgaattggaggctcaacaaaatgcaaaagcataacgcgttggtttccgttgatcaactcaccaatgatttagtcgcaggtctcatcaaccgcgctagcgcctttaaaaagggcgcgacaagcaaattaactcggccggtctacgcaatgaacctattctttgaaaatagcacacggacccatacgagtttcgaaatggcagaacgcaaactcggcatgaccgtcttagacttcaatgccgatacgagttcgacttccaaaggcgagaccctcagcgatacgctcaaaacggtacaagccattggcgtcgatttcgttgctgtccgccattctcagaataattattacgacgccttactcgcagatgatcaattccacatggcactggccaatgcgggcgatgggagtgggcaacacccatcccaatgcttactcgatttaatgacgattcacgaagagttcggccactttgtaggcttaaaagtcgtcatctgtggtgacttgcgtcattcccgggtggcacggtcaaatatgcaactgctcaaacaactcggcgcaacattgtattttgccggccctgaggcatggttcgcccctgaatttgcccaatacggacaaccagcccaactcgatgacgtcttaccagaagttgacgtcgtcatgttactccggattcaacacgaacgctttgctgccgatgaaaccttatctgacactgcattccatactcagtacggtttgacaactgagcgggcagcacaccttaagtccagtgctatctggttgcacccagcacccgtcaatcgtgacgttgaaattgccgacgaactcgttgaagccccacaatcgcgaatttttaaacaaatgaccaacggcgtttttatgcggatggccatcattgaacacctattagaccaacaacatctgattcaacattaagagggggatctgctatgtatcaattgatcaaaaacggccaagtcttgattgacggccaactgcaaaaacgcgacatcgccatcgatgcaaccggtcagattacggcaattgaaccaacgattaccgcagtcccaaccgacccagaaacgatttatgacgcacacggccatttcgtcagtgccggcttaatcgacggacacgtccacttcagagatccaggcttcacgacaaaagaaacactcaaaacagggagcacagcggttgcccacggtggttttactagcgtaattgcaatgccgaacttaaagcccgtacctgataacttgctagatttcaagacactggttgcacgcaatcaggcagaaaccagcgtccacacatatcaatttgcaccgattaccaatgagttaactgaacaaacaattgtcgacatgtcggcgtttaaggcagctggtgcagcaggctttaccaacgatggtcatggggtacaaacggcacaaacaatgtaccaagcgatgcagatggccgcccagattaacatgcccatcgtcgcgcacgtcgaagatgaatcactcgtcaacggcggcgtcattcacgacggtcaagccgctaaaaaactaggcgttcccggaattgcgagtgtcagtgaatccgcccaagtcgcccgggatatcgagctagcacgggcgaccggcgttcattatcatatctgccacatctcaactaaggaaaccgtcaatctcgttcgccgcgcaaaacaagatggcctcaacgtcacttgcgaagtcaccccacatcatttgttactcgatgattcagcgattaccagtgacaacgcaatgctcaaaatgaatccgccactacgaacacttgcagatcgccaagcactctgggcgggcttaatggatgggacgattgatattattgcgaccgatcacgcaccgcataccacagaagagaaacaacagtcgttattgaaagcgccatttggtatagtagggagtgaaacagcctttagcttgttatacacacatttagttgccaacggtccatttagtctcgcgcaactgacaagctggctaacaaccaacccggcccatgttttcaacttaccacacgccggccagttagcggttggccaaccagctgaccttgctgtttttaatttaacggataccaccacaatcgacgcaaacactttcttatcgaaaggccacaacacgccatttatcggcgaagcagtgcaaggtgatactttattaaccttggttgctggtcagattgcatatcaaaaggagtgaactaaaagatgaaacgttaccttattttagaagatggcaccatcttccccggcaccggttttggcgccccaattatctcgacaggcgaaatcgtctttaacaccgggatgagtgggtaccaagaaaccattactgatcaatcatacaacggccaaatcatcgcttttacataccctttaatcggtaattacggggtcaatcgcgacgactttgaatcgattaaaccaacctgtaaaggggttgtcgtccatgaaacaccacgcctagcaaataactggcggatgaatatgagtcttgatgactttttaaagcaaaagaaaattcctgggattgccggcatcgatacgcgggcactcactcgccgtctgcgcgataaagggaccatgaaagccagcatcgttgatgccgcagacgatcacgcgttcgatcaactcaaggcattggtcttaccaaaaaaccaagtccaacaagtctcaacggccaaaccttatccgagtcctgctaacgggcggaacatcgtcgtgattgactttggcttaaaacatagtatccttcgtgaactgtcaaaacgcgactgtaacatcactgtcttaccatacaacacaacagctgaagaaattctgagtctcgatccagacggcgtcatgttaaccaacggccctggtgatccagaagatgtgccagaagccattgaaatgatcaaagggattcaaggtaaagtgccgattttcgggatttgtctcggtcaccaactttttgccctcgccaatggggctaaaacctacaagatgaagttcggccaccgtggtttcaaccatccggtccgagaagttgccaccaaacggatcgacttcacatctcaaaatcatgggtacgccgtggatgccgactccatcgacccacaaaaccttctgattacacacgttgaaattaacgatcaaacagtcgaaggtctccgtcatagacaatatccggccttttccgttcaattccatccagacgcagcccctggtccacacgacgctgcacatctattcgatgaatttatcgacatgatcgatgacttcaatcgccgccaaaaatagtaaaaaggggatttagtgatgccaaaacgtaccgatattcataaaattttagtgattggctctggcccaatcgtaattggtcaagccgccgagtttgattactcaggcactcaagcctgcttagcgcttaaagaagaaggctaccaagtcgttttaattaactcaaatcctgcgacaatcatgactgataaagccgttgctgatacggtttatatcgaaccgatcacgattgactttgtcacgcaaattctacgcaaagaactcccagatgccatcttaccaaccctcggcggccaaaccggcttaaatatggctttggaactggcaaacaacgggattctcgccgagctgaacattgaattgctcggtaccaagctcagcgcgattgatcaagctgaagaccgcgaactgtttaaaaacttgatgaatcagttaaacgaaccgattccagaatctgcgattgcccattcactcgttgaagcccaaacattcgttaacgaaaacgggtatccggtcattatccgtccagcttttacccttggtggcactggtggcgggattgccgaaaatgccggtgaactgagcacaattgtcaaaaacgggcttagcctatctccagtcggacaagtcctcgttgaacaaagtattgccggtttcaaggaaatcgaattcgaagtcatgcgcgacaaaaatgacaacgcgctagtcgtctgcaacatggaaaacttcgacccagtcgggattcatactggcgattccatcgtatttgcacccgttcaaaccttaagtgaccgtgaagtccaagcattgcgcgatgccgcacttaaaatcattcgcgccttgaagattgaagggggctgtaacgttcaactcgcccttgatcctaatagcgaccgctactacattatcgaagtcaatccacgggtgagtcgttcatcagcccttgcttctaaagcaactggctatccaattgcaaaaatggcggctaaaatcgccatcggtttaacacttgatgaaattcataatccaatcaccgggacaacctatgcgcaatttgaaccgatgctcgattacgtcgttgcgaagattccccgttggccatttgataaattcaacaaaggtgatcggcaactcggcacccaaatgaaggccaccggtgaagtgatggccattggacgcaacattgaagaagcattactcaaagccgttcgctcacttgaaattggcactgaccatctcgaaattccagcattgacggcagtcggtgataacgaccttgtccaacggattgtacatccccaagacgaccgacttttctaccttgccgaagcattgcgccgcggttattcaattcaagaacttagtgaattgacaaaaattgatcttttcttcctggataaactcagccacattgttgaaattgaagaacaactccggaccgataaaggtgacttagaattactcgaactcgccaagaaaaatggctttgccgacgctaaaattgccgcaacttggcaaatcatgcctgcccaagtccgccaaatgcgccaagaaagtggcattcagccagtttataagatggtcgatacttgtgcagccgaattcgaatcacaaacaccttattactacgcgacttacgaacaagaaaacgaaagcattgtcagcacaaagccttcaatcttagtgattggttccggtccaattcggattgggcagggggttgaattcgattatgcaaccgtccactgtgtgcaagccatccaaaaggcgggctacgaagcaattatcatgaacagtaatccagaaacagtttcgactgacttttcaatttcagataaattgtacttcgaaccactgacactagaagatgtcctcaacgtcgttgaactcgaaaaaccagaaggggtgattgtgcaattcggggggcaaacagccatcaaccttgccgaaccactgaccgaaaatggtgtgcagattctcgggacaagcgtcgcgaacttaaaccgcgctgaagaccgtgaccaattcgatcaattaatcgccgaactcgacattccacaaccagtcggggcaaccgcaaccaatacgccagatgcgttgaagattgctgaagagattggttatccggtcttaatccgacctagtttcgttttaggcgggcgggcaatggaaatcgttcatactgcagaagaccttacacattacatgaaagaggccgttaaagtttcagtcgaccaaccggtcctaattgaccgctacttaatgggcaaagaatgcgaagtcgatgccatctgtgacggcaaagatgtcttaattccgggaattatggaacatatcgaacgcgctggtgttcattcgggcgattcaatggcggtttatccaccacaaaatctgacggatgcggaaaaacaagccatcatcacttacacgaccaagctctgtttagcacttgaatgtcgcggcttgttaaacatccaattcattatccaaaatgaagcagtctacgtgattgaagtcaatccacgggctagtcggaccgttccattcttgagtaaagtcaccggcatctcgatggcgcaactggccacccaagtcattttaggcagcacactagctgaattaaagagcccaaccggtctattaccagcgggcccactaattcatattaaagcacctgtcttctcattctcgaaactcacgcgggttgatagcttactcgggccagaaatgaaatcgaccggggaagtcatgggaactgacgtaacgatgcaaaaagcactctataaagcgttcgaagctagtgggatgcacttaccaagtcacgggaacgtcttaatgacaattactaaccaagataagacacaagcgctcgaattagcaaaacgcttccgcgaagttggctatcaaatcattgccacgcctgggactagtcaagaattccaagcagcaggtgtgccagtgcaatccgttgccaagattaatgctacgagcggcgatttacttgataaaatcaaagccggccacattcaactggtcatcaacacaaccggcttgaacgaagccccacaagtcgctaaagacagcatcgtcattcgccaaaccgccattgaacacggcattccattgatgacctcattggataccgctgatgcgatcttagcggtcctagaatctcaatcgctcctgaccaaaccactttaaaaccactaaaagagtctgaagccctttgcctaaggctcttttattacataaaaatcagaaggagtctgctaaatgttgccattagaataccaattaaccctcactaagcaaaccgaaattgcccccagtatctatgaattatgcctcaccggagacctcgcacagcaacccattgcaccgggacaatttgtcgatatcaaaatccccagtgacgcccttttattacgtcggccatttgggattgccaacgtcgaccgccaaactaacacgattaccttgttataccgcgttgttggtgaaggcaccacgatcttaagtgaatcaccggtgagcacaagcttgtccgtcttagggcctcttggtaacggttatccaattgaccaattagtagccggacaaaacgcgctaatcattggtggcgggactgggattccaccattacatgaactctcacggcaacttaatgcaaaaggcgttcacgttcaacacgtgttcggctttgcaactaaagcagccattttctatgaagatcactttcgcaagctcgggccagtcgcttatgcgacaaatgatggctcgtacggctaccaaggccatgttggtttattactcgatgcacagtttgctgatgcgacaacccgatatgatgctatttacgcatgcggaccaaaaggcttgttaatggccgtcgataatcgattcagtgagcatcccaatgcctatatctcattggaagaacggatggcttgtgggattggtgcctgctacgcctgtgtcaccaaactcaaacgtgatccaagcattcagctcaaaatttgcgatgacggacccgtcttcaaaacaaacgaggtgctcatttaatgacagacttagcagtaactttaccaggcttagctttaaaaaatccgattatgcccgcctccgggtgttttggcttcggtcaggaatacggtcgctattatgacctcaacgaacttggcgcaattattatcaaagcggcaacgaaagaaccccgacttggcaatgcgacaccacgggttgctgaaaccccaagtgggatgttgaacgcgattggcttacaaaatcccgggattgaagtcattatgcaagaaaaattaccctggttagccgagcattatcccgagttaccaatcatcgccaatgtcgctggcaatactgaagccgattacgtttatgtctgtgaacgcatcagtcaggcacccaacgtccatgccatcgaactaaatatctcatgtccaaacgtggcccatggcggtctcgaattcggtacatcaccagaagccgctgccacgttgacaaaggcctgtgttgcagtcagccaagtaccggtttacgtgaagctctcaccaaacgtgacggatattcgcccgattgcgcaagcagtcgaagcagcgggggcagccggcttctcgctaatcaatacactggtggggatgcggattgatccgagaacacgccaaccaattctcgctaatcaaacgggcggcttatctgggccagcaattaagcccgttgccatccggctcattcatcaagtccgttcaatttcgaagttaccgattattgggatgggcggtgtctcaacagctgcggatgcacttgaattaatggccgccggcgccaatgtcatcgcagtcggcactgctaatttcagcgatccatttgcctgtccaaagctaatcgccgcattaccagatgaactcgctaaatatcaactaaccgatttaaaatcattcggtctaccacaggagggcactcatgactaaccccttaattatcgcgctcgactttccaaactgggaaacaacgaatcgttttttagcacaatttccaactgatgaatccttattcgttaaagtcggcatggaacttttttaccaagagggaccacagctgattaaaacgttaaaagcgcgcggctatcggatttttctcgacctaaaactctatgacattccaaacacggttcaaagcgcgatgactgtaatcggccaactcggtgtcgattacacaacgattcacgcagctggtgggcaggccatgctcaaagcaggggcggctggtctgaaaaaaggcgccgcactcgccaacgtgcagcccgctaaactactagcgattacgcagctcacgtcgaccagcgaagcgcaaatgcaaaccgaacaactcgttaatgtcagcctaccagaatctgtcgcgcactatgcgcaactcgcacagaactcggattgcgatggcgtggtctgttccgctcaagaggtgccaacgattcgcgaacacaccaatgctgattttctctgcgtcacacctgggattcggccagcaacaagccaaaccaatgatcaaaaacgggctgtaacaccacacgaagccgcacaagctgagagctcggcgattgtcgttgggcgcccaattacgcaagctacaaatccatatcaagcttaccaagctatcaaatcagaatgggagtctttcaaatgacaacaattgcacaccaagtcgcacaagccttaatcgatattcatgccgtcagtctcagtcctaacaacccttttacttgggcgagtgggctaagaagtcccatctattgcgataaccgtttaacgattggttatccaaaagtccgcaagctcattgccagcaacttagctgcggcaatcaaagcgcaattcccagacgttgaagtcatcggcggaacagcaaccgcggggattccccatgctgcatgggtcgcagccgaactcgacttaccgatggtttacattcggtcgaaaccgaaagatcacggtcaaggccgtcaaatcgaaggaccgtttaaagccggtcaaaaattagtcctcattgacgatttaatttcaaccggcgggagtgtcttacaagcagcggctgccgctcaaaaagagggcgcagaagtccttggtatttttggcatcttttcatacgaactggcagccggccaacagaatttcgcaactgctaacttaccactaacgaccttatcgaatttctccgccttattagcggtcgaagaagccgctgataacttaactccagaacaagccacatcactcaatgaatggcgccaagacccacaagcatggtcagacgcccattagaatagagtgttaaccggaaagtaatggcttgcagaacacgtttagcgtgtgccatcagccgcaccaatcaaagaagcgttaccccaattcactttggagtaacgctttttattagtcttgcacaggtttgttacgtagcttttgaacgagttgctcgtctggtgtcgtataaagtgtttgttgcccttcgtaaatcacaaaccctggtcgcgcaccgttcggttttttaatcttcttaacctgaatataatcaactggcacggccgctgataagcgcgccttcgagaagtaggccgctaagttgccggcttcttgaagcgtatcttctgatggatctgggctatcaataatcacatgagacccgggaatgttcttcacatgcaaccagatatcagttttatgggcttttttcaaggttaattgatcattttgatagttattcttgccaacgaaaatccgggtgccatcactcgcatagaaaacttcaggttcactaatcttgtaacgtttctgcttcttggcaccggttttcttagcctttaaataaccttcagcctgtaattcagctttgatatcctctaaatctttgggttcagcaatttcaatttgcgccataatcgtgttgaagtaggcaagttctgcttcggtctttgccatttgttcattgacgtaggcaattgaattccggagcttctgatatttcgagaaatacttctgcgcattttttgaagggctaatctggttcgacaaggtaatcttaagcggttcgttattgtcgtagaaattgggcaacgtgacttcagtcatgccacgttcgacttcccgcaaataggtggtcaaaatttcacccttaatccggtaatcatccgcactgtcggctgcttttaacgttttttgtagttttttcagtttcttttcatccttttgaatctcgttgcggatgaagtggatgagcgcaccaccttgttgctgcactcggtcacgctgcgccttgtgtaagtaatattggtctaacagctcactcaacgtgtcaaaatggctcagtgtccctgtcaggctctcataagggaaggccgtgaaccacgacttcttgtcaccaactgttaacgttggtgtcacttggtcgaattgcttgaagaaatcagtcacaaccgccaaataattgtcatgatccattaaacgggtttgtagttcaacggcactttcatgactcatcccttggaagtgttgttgtaaccatttgacttgttcatcagcagcttcgttataataacttaaccaatcaagcgtctttaaatcagtcgtaaaaccatcaaccccggttgcagccggtggattaacataatcggcgccaggcattaagaaccgataacggttttgcgaaacaccgacgtgccggattaaatcgagaatcttattggtcgcttgattaatcaaaatcacattactatggcggcccatcaattcaacgattaagcatagttgttgtaagtcccccagttcattccgtgatttaaaggtgaatcttagaatccgatcactttcaatttgctcgatgttttctaaaatggcgccatctaaatacttccgtaaagacatcgcgaagttcggtggcgttgcggggtttgcataaggcacccgcgtcacttgcactcgcgcataagatgggtgggctgataggagaaggggataggtcttacgatttgcccgaatcgttaagattacttcgtttggataaggttgttgaattttcgtaattttgccgtctgctaaagttgtatttagctcatttacaacggcgtgggtcattaaaccatcaaaggtcattattgctcacactctctataattgaattgtcttacttattgtaacggttttgcagtggaacctcaaagaaattagttgtttgcaatcgctaacacgactattgtataatacaattatcaaattgctttatacaattaaagggggatttaccgtgcgctcaacctcagcaacgtttaatcaactgaatctattgtatcaagaacaaaagaaacactgggcgctacgactcgacttgaagttagcccaagtcaacattctaatggccattgaacccgatcaagaacgcatttcgcacgcagaattaattacgttaaccaaactcgatgcatcgacactcagtcggcagttaaatacgatggctcaagaagggctgttaacaaaagtgaccggggctgatccgcgccaacgcgtttacgccttaacaccgaccgccaagacggcattaagtacgttgcaacaacttcaaactgcacttgaaaatcacattcaacaaaactggagtaccgatgaacagcaacttttaaaaatcctactgaaccgttattatcaaagctttaatcgaccattaaaatgagacgccctatacatttttcggaaaatcggcatttttaggggaattaacctaccatttatgatatagttattaccgaataataaaaaagtaggtgtcaccatgaaaattgctgtagtcactgatagtaccgcttatctcacagaacagcaagtgaaagaccatcatctcttcgtcgtacctattccggttatccttgatggccaggtctatgatgaaggcgttgatataaccactgaagagttctatcaaaaattaaaaacatccgaaacattccccagtacatcacaaccaccactgggtgaaatgttaaaactatacgaagacctcggcaacgaagggtatgatgctgtcatcagcatccaccttgctagtaccatctctgggtttgtcacgacattgaaaaatgcggcaagcaccatcgataacatccaggttgtcccatacgattcagggattactgtgatgttaatgggctacttagcaatggaagcggccagaatggcacgcgacccagaagtgaccgtcgaccagattatcgcacgccttgacgatctaaaaagcacaatggatgaatgtttcattgttaacgacttacaaaacttagtgcgtggtggtcgtttatcaaacgcatctgcttttattggtagcatgttgaagattaaaccgcttttaacgtttgacgctgacactaacaaaattacggcatttgagaaggttcgttcattgaagaaggcttacgcccgcgctgaacaaatttttgctgaaacagccgaacgtgttgactatccattacgcgcactaatcattcacgctaacgatgaaccagcagcgattgcatggcgtgataagcttcaagcaaactatccagacttaccaattgatatcagctactttggcccagttatcgggacccatcttggtgaaaaagccattgcacttgcttggattaaagattttgataaagcctaatttaaaagcctgtcgaacaattcgacaggctttttttgtgacttataagatagaaacgggttcttctaaggtaaccaacttcgtcccaattagcttataaataacggatttaacggctactttttgaacaatgttgagcggttcctcgtttaaattgaattcattaaccgttgattgcgcgttaatattcgcaatttcggcattaaataaccgcacaaactgatcatatgccttaccagcggtgtcgtttgccaacgattgcgaaatcccttgtttaatgacatcgagcgggaagactaatttcataatgctgaccacaatcaattcggctaaatgatcccgattatagcgtttcttttccggtcgttcaataatcgccattttgacatagctattaatcattgttttcgttattttaacgtccaacaaaggactcagtcgtttattgacctcactaatgacttggtccatatagaggtctaaatctggaaattcagaccataatggtaaccgcaattgttgaaagtcacccaaccatttttcaaattcttgtgattgcatactgattaacgccaccaatctgttgatagtatatttattatgccatagcaattatcatttgtcactaacatagaatcgaattctattatctattgacttataatctacattcgcgctataatactcggcaaatagagaaaaagaggcgagaaccatgcaactttccacgattaaacgacaacaactgatttatgaaatatggaatgccattacccacgggattggttttttcggtagtttaacgttagtcatcatgctcctggtcaaaagcattcataaaacactctcaccagtcgcgattgctagtctagcagtgtatggcgccacattactgctactgtatctcgcttcgactttatttcactgcttagcatttaccaaggccaagcgcgtgtttcaaatattcgaccatagcaatattttcttgctgattgctggtacctacacgccatattgtttgatttttattggccatgcaacaggaattagcttactgattgcaatctggacactagcgattgccggtattataacgcacattttgagccacggtcggtaccaaaagattgaaacaacgatttacgttgtgatggggtggttatgtttattagctggtaagaccctttatgtcaacctcagtccagttggtttttggctgttagtcagtggtggcgtagtctttaccgttggcgctctaatttatagttttcctaaaattcctggcttacatttgatttggcactttttcgtaatgctcggaacgaccctgatgtttttttcaatttacctcaacatttaacttgaaggagtacaactcatatgacaattaaaattgtaacggactcatcgattcaactgacagcagacgaacgcgctaaatatgacattcacatcgtccccttaacgattcaacaaggaaatgagtctttcattgatggacaaaccattacccgcgctgaatttttaagtcgcttacaaaatgcaacgaccgattttccaacaacaagtcagccaactgtcggcagtttcgtcgatttatatgatcaattaggggctgatggtagtacgattctatcgattcattgtaccggcttgttaagtggcacaatcgaaggggcacacacagcagcccaccaatcaacaagtgacgtacacgtgattgatagtaaagcaatcgaccgtggacttgcttatcaagtggttgctgccgcccaagacgttgaagcagggaagcctcttgatgatattatcgcgcatctcgatgacatccgtcgtaaaaccgaaacctacgtctttttagattcacttgacgcgcttcaacgcggtggtcgaattagtagaatggccgggctattaacgaaaatcattaaactcaaggtaattgtgcgcttaacagatacggaattagaagtcgtcgcaaaggggcggggactaaaagcttttacaaaagaactcaacaatatccgtgaatacttagccacccaagacgttgcggaaatcggcatctcacacgtcggaatcacggatgaactatccgctaagatccaagcaacgcttgaagaaacacagccccatgtgccttatacagtcgcactaaccagcccggtcattatgagtcacgttggcctaggggcgtttggtattttctatcggacaaaataacagctgacaagaacgtctcattcgaggcgttcttttttattgccccttaaaattgcgcaaaatctagttgcgttatttcaatgaacgttctaataagagaggagcatccagatgcggacaaaaacatttgaagcaccggttgtcttagacaaagccatgcttgtcttttggcaacaaggctatgagaatacctcaatgcaaaacctagttgatgcaatggggattcaccggcgcagtatttacgatacattcggcgataaacatgaactgtttatccaagtactagcacattatcgtgaccaaattaacgagcgtttcgagcaagtactggcaacacataccgatttaaggtcgcgcttaacagccatttttgaaatatttattgaccatccggataaccaaccagccggctgcttagtggtgaataccgcggcaacgttaaattcattagaaccagacatccaaacgctgattcagcattatttaacccaagaaaaagcactgttgcaggcattactgattgccggccaggccgaactagaaccgtctgttgcaattgatcttttagctgcatcgcttcaaagtgcgctcattggtatccgggtcatggctaaagtgaacccagattcaactacgctaacagcaattgtgcaacaaaccctacaaacactcccgtggaaagaggttttctaatatgaaagcagctcaaattaaaaaatataatcaaacactagctgtcacgattcaagaaattgatcgcccacaaccgctagccaatgaagtactcgtcaaagtcgcctatgcagcggtgaatccattggatccaatgaatatccgcggcgatactaaattaatgcaaaactatactttaccactgactttaggcaatgaaattgccggtgaaatcacagcgattggaacagacgtcactgatttcaaagtcggggatcaagtctatgcgcgtttaccattggctaaaatcggtggctttgctgaatatgtcgcggttaccaccgatgcaatctggtacacgccaaaggatttatcgctacgtgaagccgttgcaatcccactgactggcttaacggcttatcaggggctatttgaggaattggcagcccaaccgaaccgaacgctgtttatccctggtggttcaggcggtttcggtcaaatagccatcccaatcgcaaaatcactaggcttaaccgtgattgtttcaggcaatgcagtcgcgcgagatcacattttgaatttgggtgctgaccaatatatcgattacaaaacaaccgattactgggaagttttagatcaaatcgattacgtgattgatacacgcggtggagcagatattgaacgtgaaatggcgattatgaagccgggcgggcggattttaagcttgattgccggtccaaacaaacaattcgctaaacaattgcaattaccattttggaagcaactcttattctcgttggccgggcggaaatgggatcgcctcgctaaaaaagcgggcgttgaatatcgctttattttcgttcgttcagatggtgcccaactcaaaaaaatcactgaaattattgaacaacaagcgattgtaccagccatcgatccgcatcaattcgatttagcacacgttaaagaggcactagaacttgttgctcacggccatccaaaagaatcgtttatattagactggtaaagtggtgattaaggttcaagcgggctaatcaagatgacttatctaacaacccccaaccaatttattcaagatcaacaaggccaacggtttgcttaccgcgaagtgggtaccggtcgcggcttaccacttgttttattgaatcacttatcagccactttagataactgggaccctgcattaattgacctgatcagtcagcaacgacgcgtgattgtctttaataatcgtggtgttggtttctcggatggcaaagtccccacgacgattgagcaaatggtagctgattgttatgcttttataacagctatgcagctcactcaattcgatttacttggattatcgatgggtggttttgttgcacaggccttcactttaaaatactcctcaagcgttaatcacttaattttagtcggaacaggtccccagggtgactcagaaatcgccaaagtggggcgcataacaacttttgacttaattcagtccttcttaacgcatagagacgttaaggaatacctcttcttcaccagaacgccccaaggcaaacaggctggtaaagcgttcattaaccggttaaaacagcgtgaaattgttgaagataaagccattacgttagccgcttatcgtcgtcaattaatagcaattaaacagtatgcgcacgatcaaccggcaaacctggcacaaattaaccaaccaacattgattgtcaacggcgatcacgatcgaatggtacctgttaatggttcatatgaattacatgaacgaattttaaattcccaattaaaactttacccagatgctggtcatatggcgttattccaaaatccaaatgactttgcagctttgttggctcagtttttaaatcactaattacagaagcgtcattttaatatggcgcttttttgctgcgcttaaacgctggtgacgagtgggtaggcttagctaattttttaaatctattttagtttacataatatatattatgcgaagaaatacttatcccttgaaagagcgctaaaataaccacttattatccaacatcattcaattgatttgatgaaccgcacttaacgcgtttgttttttacactgcacgattcataaactattacaagttactcaacgccaatatgatgaatcaaactgactggccaaccgatatcgccaaacttaactttaaatgcagaattcatctaagctcaggcacaaatccgtgattaatctgacgattatgccagattttaattggtaaatacgcatattaacacatcttagccttaaaactcacatatcaaatcgttaaaaaaggccttaaacgttgatataccagcttttaaacggaataaggatctttaggttgctatgcagatagtcgaataagaccatctgatcatcagtttgcggaacggtttgcaatacaagtgttgttaaaattatggttttaacaacacttgtagtattctcacctcatttttgctaaactatctttaaactgttaattaaggagtcttccatcatggatcaacaacgttacttagaactctgcgaaaagcaactcgccaatcttccggattacattcgtaaattctacattaaccgccaggcaaacgcctactcttctgcaacgctctatcaatacttacaagaatacgttcgctttttcacctggttagttgatgaacagatcgtcgcggtcccctctatcgaccagatgccactgaccgcactcgaaaaaatgaaactcgaagatattgagctctacaagatttttctaatgaataagcgtaaacaaaataaccataagctctcctttcaagccgttaaccgctcgattaacgcattaaatgcgctctggtacttcttaaccattgaagccgaacaagctgatggtgagccttatttttaccgaaacgtcatgaagaaggtgaaactacttaaagcttcagaaacaatggcgacacgttcacgacacatcagcaaacaactgctgaccggtgaaaagaaacacgacttcatcaccttcatgcaagttgattaccctaacttgctttctaatcgccaactggcatcatacaagcaaaattgcgaacgcgatattgccatctgtgtactggcgctggcaacgggcatccgactatcagagttggcccaagccaacatcaacgatttgaatcttgaacaacttacaattaccgtgatccgtaaaggcggacagcaagatactgtcccaattgctccgtggagtttaccttttttaagggattactgccagattcgtaaatcacgctatctaaaagaagataatgaacaagccttatttgtcagtcgctatcgtggcagcgccaagcgtatgagcaactatgccattgaaaagttagtcgcgaagtattctgaagcatttggcgtgcgtctcacaccacacaagttccgccatacacttgccactgatctcatggcggcaactcatagtgaaacaattgttgcgacccaactaggccaaacgaccacgcaagctactcacttatatacgcacgtcgttgctgatgaacaacgctcggcaatggaccagcttgaatagccactattagtgctcttcttggcaacgattatcaatgtcgttctaacagtcatttggtttacatcaattcgtcgatttacacattgcttgacttataccagctatcgagtatactgaaagcgttcctaaaaattaaatgttaaccatcgcaaaggggagccattggctgagagtgattttaatcagacccttcgaacctgtttgttaagacaagcgtaggaattgtgatggagttgaaatgataactccttttttgtgttggttgaacaagaaaaggggttatttttatgcaacatcagcgtctattgattcagattgaaggggcaatcatcgcggcatttgccgtggcattggaatacatcccccatacagtggggccttccgcaatcgaagtctcctttgggattatccctattgtaatctacagtttacgccgtggtgccattcctggaatggtctccggcttaatctggggtctactagacttaatcttacgtggattaggaaacggtagtgtcttgaacgtatggcaaggattgctagaatttaccattgccttcatggttgttggtttagcaggtatcttacaacgacctattcaagcaagtattcaaaatcatacaaaagtcaaaacgatgacccttttattgatggccgcattttttggtacttttgcaaaatacttctgccacttcttagccggtgccgtttattggggctcatacgctcccaaaggtatgaatgcttggctatactcgctcactgttaacggtggcagctttatcgctagcttcattctaaccggcatcgttctatgtatttgtttagccatggtgcctaagttatatttaccaaaagacatggttttacacgtacaatctgaaaaataaacaaaaaaagagccgtattaacacttgaatggtgttaatacggctctttttaattcccttaacgatccgttctagctcgtaatgcatataagattgaaactgtatcgacaacctcttggaataaagcccccactaatgctggaacaatcccggtgctggcaatcaacattaacccaatacagattgcaatcccaatcaaaaccgcctggcgagcaacgcgcatcgtgtcacgcgcgatttgaacggcacgactaacccgtcctaaatcatcttttagaatcaccacatccgctgattcacttgcggctgttgcgccatgggcccccatcgcaatcccgacatcagcacttgccagtgacggtgcatcgttgaccccatcaccaaccataattagtgggcgttggtcttgcagtacttgttcaattaaatgaatcttatcgactggcagacagcctgcatggacgtcatcaattccgacttgttccgcaatctggtgcgcagttgtcgcttgatcgcctgtcaacatcatcaaacgcgtaatccccagttgatggagcgtctgcatcgtggccggtgcttctggtcgtaaatgatcgataaacgtaatgtaccccgcatattgatcattgatcgcaacgtaaacagtggtttgttcttgcagaggctgttgcgcatctggcgtcacgaattgatgtttcccaacacgaaccgtttgtccagacgacagcgtcgcaactaccccagcgcccgttgcttcttttaatgtttcaattggttgtaattgttctacctgtgccgctttaacaagtgaccgtgctaaaatatgcgaagattcttgctccgcactagccgccaattgcaataaatcggttggtgcgataccaatcactggcacaacttggtcaaccgtcaattgaccattcgtaattgttccagttttatcaaacgctgctgatttagcagacgctaatttttcaattgttgtgccagccttgacaataatcccgtttcgactagcacgactcatccctgagattaacgcgataggcgctgccaatattaatgggcacggcgaagccacgacaagcacttctgcaaaccgtactggatccttagataaccaccaagctactccagcaatcacatacgcaactaatgtaaatggcacggcatatcgatcagctaagcgcacaaaatgcgctggttgtgccgcagaggtctctacaagccgtacaattgcttgatattggctattaacggctaattggtcaacttgcatggtaaccgacgtatcgccgttcacagagcctgacatgagctcatcatttagtgctttttcaacggggcgtgattcacccgttaacgatgattcatcgaataaagcacttcctgcaataatatgcccatcaacagggaccaattcgccaggtttaataatcacttgatcaccaacttgaagcttatcgactgaaacatcttcgaccgcatcattaacaaggcgatgcgctgtttgcggagaattatcaagtaatgtctttaactcacggcctgctttatgcgctgcatagtcttccaatgagtcgccaccagttaacatgaccaagaccattaatgctgcccaatattcaccgaccgctaacgtcgcaataatagcggtaatcgctaatagatccaccccgtattgaccagattttagcgttttaatcatctcaataaacatcgagagcgctactaagctccccgctaaactcactaaaatctgtgcccacaatggctcatgtagcaaaaacgccaagcatagcgcaatcacacccacactaattgttaaggcaaacttgatggtatgtttcatcgtcaatcgctccttcttatgaattcatttacattataacacatttttagttagattagaataattccaatctggtggcacacaaaaaagcccccaaattaatgaggggtcttttttgcagatagttggtttataatagcagtctgcacggcagtcatcgctgctaataatagagtcattcgttttatcacgggtgatgttttttttgattagagagtgctttttcagttttatgaataatcgattcaatcggggcttgtgcctcgactaaggcttcgactgttatgtctgtgtgcccgttcaataaatcacgaccaacttctaatgcgtaaagcctattttttaataaagtaaattgagccgaacccgctacaaacttcagctgactcttttggcaatttcgaattgtcgcttcaatcacttgaattgcatcaatgctttcctcggtcatttacctatcctcctaataaaaaaataaagccccgaaggactttattattaatcgttattaaaatgcttctgttaattgtggaaccacttgtttcttacgtgaaacaacaccggctaattgtgcacgatggttgttcaattttacgttgaatgctttttcaaaggcttctgctggttcaccgataacaagcgcttctgagttactgtttaagatgtcagtaatcaaaagtacgaataagtcgtaaccattagctttattgtctgcttcgatagcagcttcaaaagcagcttggcgtttgaagaccgcttcgatatcaactgtattcacttgatcgatacgcacttttttaccagccatatcgaatgttttagcatccgcttcaattaattcagcttcgctcttatcatctaagttagtgcccgcttttaacatttcaagaccatatgattcgaaatcaatatcagcaatttcagccaatgtcttaatcgcaatccgatctttttcagttgttgtaggtgatttcatcaacaacgtatctgaaatgatagcactcatcattaaaccagctaattgagctggaatttcaactttgttttcgttgaacattgataataaaattgtgctggtacagccaactggttcagcgcggtagaataatgggctgactgtttcgaagtttgcaattcgatgatgatcaacaacgtgcgtcactgttaaatctttgatatcggcaacactttgttggctttcgttatgatcaaccaacatcacactgtcaacttcactgcttgcttctttaatgatgcgaggggttgctgctgcaaaatgacgcaatgcatagcttgtttcttcattaggttcacctagcgcaacggcttctacgtcgtttcctagttgttgttgaagataagcaaacgccattgccgcaacaattgcgtctgtatctggattttggtgaccgaatactaattctttactcatatttatacagaccttccttttaaaaaaataacatcctaattataccaaaaatattagacgattctacggttttgctctctaatccgtgttaaataatctttttcttctaaataatggtcgaattcacggaaaaagctattaatccgtggaatatcttccttttccttgcggaagacaaaagctaattcgaactgaatggccggatcaaattgaaccgcgtttcccttaagtcccaaattatgtgcttcataaaaactctttggtaaagctgtacttaattcagttgcttcagcaaaacgcatgatttcaaatggtgatgtgaattgagccgcactcactggacgatcaaccaattgattcttataggcttcactgatgaattgatttaaatagtattcatctgggtatgtcacccatttattatctaatgtatctttaaaacggatcttcttacgcgtctttaaagcaggatcttggctgataaagagtaagcgttcatccacaatcttatgtgacttataaggtttccagttcttaatgctgtcatctggcaaatacataatggcaatatcaattttattattttcaagtcggtcccagatttctttccgagtcaataagtgcatgctgacttcgatgtcaggaaattgtttatagtattgaattaagaaggattggataacactgatttccatcgatgctaaaatcccaatattaatcttaccgcgcgtcgcactcgttgaactttgaatttcatccgtcgcagtatttaataaatcatgaatccgatgggtagcatccaacatcgtccgaccagcatccgaaatatgtaacttcttgccgactgaataaaataaaggcgcgccgactatccgttctaattttttaatctgttgggttaaagcaggttgcgtgataccgagtagttgtgccgcttgggtataattcatcgtttccgctaactgtaggaaataggttaatgttttagaggagaagatattttcttgtcttgttttcattttcaaatctccgttctttagtttacgcctatcattataataataaagatataaaaaaagagcaacccctttcgttgctcattcttattaaaggcttaaaattttcttatgttagcgttgctgctttggatagtctgctgtatgcaatagacgctccgcattgacaacgcgatcgtgggtcggtggttcaatccccgctaacggatatttaatccccatcttttcgtatttcacgattcccatcgtatggtagggcaacacttcgactcggtcaacattgtttaacgtttgaatataatcccctagacgagtgagatactcatcgtaatccgtccgttctggaatcaagacgtgccgaatccacatatgatgaccatgatttgacatatattcaatcatttccaaaatatgttcgttagaaaagccggttaactttttgtgccccgctggatcaatatgcttaatatcgaccattgaaagatcggtatatttcatcaattctttgaatttactaaagaagggttctttatacgtaaacggctgcccacaagtatccaaacaggtattaatcccttgtgccttacactttttaaataaatcaattaaaaaatcaatttgaattaaggattcaccaccgctacaggtaattccgccatctttaccccagaaggccttatatggcagtgcctttgcgattaattcgtctgcggtataagcttctccgctaccaatattccacgtatctggattatgacagaattcgcaacgcatgcgacagccttgtaaaaaggcgacaaaccgaattccgggaccatccactgaaccaaatgtttcaatcgaatgaacatatccaattggcacctctggtgttatcggggtttctggaacaacattttcagttgataaccgtgttgtaaatttaattgtcatttcactttcacctcttaaaagaaaagctatgctttctggtaaagtcgttaattcgcgttaacgaccttaccagaaagcggatattgctatccactttcgttagattacatttcgtcaaagaacgttcttgagataacgtcgtcttgttgttccttcgttaaatcagcgaagtagacacaataacctgaaacccgaaccgttaatgttgggtattcttctggatgttgttgtgcatccattaaggtttgcttattgaagacgttgatatttaaatgcatcccttgattaatcatgtaaccatcgaccatgttcacaagcgcatctttacgtgcttcatcatcatgccctaatgtatttggtgtgacaccaaacgtatttgaaatcccatcagttgcataacggtatggaatcttcgcagttgaaagtaatgatgctaaagcaccgttcttttcagcaccgtatgctgggttagcacctggtgagaatggttcgccagcttgacgaccatttggtgttgtcccagtattcttaccatacacaacatttgatgtgattgttaaaacagatgttgataattttgagccacgatataaatgatgcgtattcatcttcgtatagaaagtcttcactaaccatttagcgatatcgtcagcgcggtcgtcattgttcccataacgtggatagtctggattttgcgcttcgaaatcgactgccataccgtcttcatcacggataactttaacttggccgtatttaatcgctgagattgaatcaaccgcatgtgatagaccagaaataccagtcgcaaatgtccggtctaaacgactattcttcaatgccaattgtgctgattcatagtaatacttatcatgcatgtagtggatggtgtttaaagcattaacgtaaacgtctgctaaccaatctaacatcttatcgtatttacccatgaattctttgtaatcaatgatttcacttgtaattggttgataagctgggccgacttgagctttgcctaattcatcgatcccgccgttaattgcgtaaaggattgtcttagccaagttagcacgcgcaccaaaatattgaacgccgtctgcaattggttgtgcagaaacacagcatgcaatcccataatagtcactcccccattcattacgcatcaaatcatcgttttcgtattgaatcgttgaactcttaattgaaacttctgttgcatagcgcttgaaaccttctggtaagcgatctgaccaaagtaaggtgatattaggttctggagcagcacccatattttccaatgtcttcaagacacggaaggcagtcttagtgacatgatgacgaccatccataccaatcccacacattgataatgttgcccagattggatcacctgagaataatgaattataatcttctgtccgaatgaaacgaaccatccgtaacttcatgacaaaatggtcaaccatttcttgcgcttcagcttctgtaattaagccccgctctaaatcacgttggataaagatatccatcgttgtatcaatccggccaactgacatcgcagccccgttttgtgtcttaatagcggctaagtaaccgaagtaaatccattgaattgcttcttgggcattcttagcaggtcttgaaatatcaaagccatagctagcagccattttcttcatatcttgtaaagcacgatattgttcattgatttcttcacgaagacgaatgacatcgtctgtcatttcaccgtcgccaacaccattaaagtcacggactttttcttcagctaaacgatcaatcccatagactgcaatccgtggtaagtcaggaataatccgaccacgtgcataggcatctggaaggcccgtaataatcttgtagtgacgtgctttacgcatgtctggtgtataagcatcaaaaacaccttgattatgtgtcttgcggtattcgttaaaaatcttgtgttgttctggatcagtcttaaagccgtatgcttccaaggcatcttcggccatccgaatcccaccaaatggcatgaatgcgcgttttaatggggcatcagtttgtaatccaacaatcttttcaagatccttgtttaaataaccagggccgtgtgacgtaactgttgcaggattatcattgtctgcggctaaaacgccacctgcttcacgttcttgtttcttcaattccattagttgatcatttaacgttgttgttgcttcggttggaccagctaagaaactttcatcaccgtcataggcagtaaagttttgttggatgaaatcacgaatatcaatttcatcttgccagtcacctttgttaaagccgtcccaatagtcggctaagttaattttttcggtttttaccatgtggattacctccattagtcaagtgttgtttatcacagttttcacaattttagtataacacatcacatagtttatgcaagccctttctttttgattgtttagaaactcttaaactcttttgaaagattgatttatagctatttatctacttaaaatatttttataaccccaccatttaaattgtgcaaaacttattttgctgttatagtacaaaaccaaaaaatccgcatattatgtataacagaaaaaagcaagtcatcacatagatgacttgcttttttattattttgactcgtcttcatttttaactggaatagtcgtttgaacaaatgccggttgtccaacttcatcaacatccatcacaaaactaccgttcgaataacggtcggcagttgcatgttgataagggttaattgcaatcacttcttgctgatcagtatgaatcagtaactcgcttgcctgctcaacactaaccattgctgctacccgatgtggttctttcttcaattcacggagaattaagaccccacgacgcgcacgacttgttaaaccaacctcacttaagagcatccgtttaaaggcgccccgttgcgtcacaatggcaacggctgcatgtttatcttctggatgatataacgtaaagccgatgacaacatccccatctttgagatccattaatttgaccccactggccttagcacctgatacagagacttcagataaggtaaaactcaatccataacctttatagctagcactaaagacggctagcccttcatcacttggaatccagttcacgtttgtcacatgagcatctgcatgcaacttaataaagtcttgtgccttagaacgatatgttcgacttggcaagaggtcagagaaggcagtttgtttaatatagccatcatccgtcccaatcacaaagtagccagcctgttcatttggcttaaaggcaaatgctgcaataatcgcttcatcagccgccaaaccaatcgattgcgaaatatgttcgcccatttccttccatttcaaatcagcaatttcatgaactggtcgttgaattaaatgtccgtaattggtgaacatcatcaattgatctaaggtttgtagtggcttttgtaaaatggcaaaatcgccgtctttcaaaccgctgtcggccccttcagatgcttgatacgagcgcaaactactacgtttcaagtagccgtcatggctaactgcaaccatgacggtttcgtcaacaacagtcacacttgtatcaatttcaagcgtctcaatttgtgcttcaatttcagtttttcggtcactccgataagttttgaccattgcttttaactgcgccttaatcacccgtgcaagtgcttttggatcaccaagaatcatccggtattccttaatcgctgcatcaagttcagctgattcttgttccaaagcagtcacatcggtattcgttaaccggtataattgcagtgaaataatcgcttcagcttgggcttctgtgaaggcgtagcttgccactaaattatctttagcgtcttttttattcttgctaccacgaatcgtcgcaatcacttgatctaaaatcgagagcgccttgattagccctgcgacaatgtgctgacgatccaatgccttttgtaaggtatattttgtccgccgaatcacgacttcttcttgatgttccaagtaggcatggaggatttctaataagccaacctgtttaggttgcatatgcgagatggcgaccatattaaagttatatgtgatttgcagatccgtatttttgaacagataattcaagatcccttgactatccgcttgctttttcaattcaacaacgactgataagcccatccgatcactttcatctcgtacttcagcaatcccatcgaccttctttaaaacgcgtaattcatcaatcttcttgaccatcatagccttgttgacttcataaggaatttcgctaatcacgatttgttcccgattgccgcgtaattgttggatgctggtttttgcccggacgacaactcgaccgcgaccagtttcataggctttcttaatcccatcgaccccttgtaagatcccaccagttgggaaatcaggtcctttgatgaaggtcatcattttttctaacgttgcatcgggatgatccaatagatagaccaagccatcagtcacttcacctaaattatgtggcggaatttcagtcgcgtacccagctgaaatcccagttgccccattcactaagaggtttgggaaccgagctggtaaaacagtgggttcttcagcggtatcatcgaagtttaaaacgaaatcaaccgtctttttatcgatgtccttgagcatttcaccagcaatcttacttaagcgtgcctcagtataccgcattgctgctggtggatccccatccattgacccattattcccatgcatttcaatcagtggttcacgtaatttccagtcctgacttaaccggaccatcgcttcataaattgaactatccccatgcggatggaaattccccatgacattcccgacagacttcgctgacttccggaaccctttatcataagtattcccatcgatggacattgcgtataaaattcgccgttgaacgggttttaacccatcgcgaatatctggtaacgcccgctcttgaatgatgtattttgaatagcggccaaagcggtcgcccatgacttcttcaagcgttagctcttgaattttttgtgcttcatcagccaaatttaatcactcacttttctattcgtctaattggtcaaataaatccacttcagcgcttgaagttgtcggtgctggttgaccattcgttgtatctaagatgctaccatcttcagccattgtgaacttaacgttttcttcaatccacttccgacgtggttcaactttatcgcccatcaacgttgtgacgcggcgttcagctaaggctgcatcatcaatccgcacccgaattaacgtccgactcgttggatccattgtggtatcccaaagttgatcagcattcatttcacccaaccctttgaaacgttgttgactgtagcctttacccatttctttagcgacgactttcaattcatcatcagtccaagcataggcaatcttcgtttttgccccagcacctttttggagcttatacaatggtggcaaggcaatgtagacttttccggcttcaattaacggccgcatatagcggtagaagaaggttaacaacaaaatttgaatatgggccccatcggtatccgcatcggtcatgatgatgactttatcgtaattgctgtcttcaagtttgaattcagccccgactccggccccaatcgtgtaaatcatcgtgttgatttcttcattttttagaatttcttgtaatttcgctttttgagtatttaaaactttgccccgcaatggcaaaatcgcttggaatttccgatcgcgcccttgcttagcagaacccccagcagaatccccttcgaccaagtacaattcattcttcgccgcatttttcgattgcgctggtgttagcttcccagataataagccatcggatttcttctttttcttaccatttcgactttgttcacgtgctttacgcgcagcttcacgtgcttcgcgtgcttttaatgatttacgcactaaggcttgcgcaaattcaccattttcaagtaagaaaaagctcatttgttcataaaccaaactatcgacagctgtccgcgcttgtggcgagcctagcttacccttggtttgcccttcaaattgcaagagttcttctggaatccggacagacaagacggcactaagaccttcacgtacgtcggagccttccatgtttttatctcgttctttgagcaagtttaccttgcgggcgtaatcgttaaaagctttggttaagccggctttcatcccagcttcatgggtcccaccatcacctgtccggacattattcacaaatgacatgatgttttcggagtagccatcgttatattgacccgcaaattcgacttcaatgtcttctttggtgccttcgaaatataacttattaccaatcgtatctttatcttcgttcaaataatcgacaaatgattgaatcccttctgggtaatggaagacatcttcacgtgctggctcagcgcgtaaatcggtcaacgtaatcttgacatctttgagtaaaaaggcagattcgcgtaatcgttctgctaaggtattgtagttataagtagtcgtttgaaaaattgtcccatctggcttaaacgtaattaacgtgccgtttggttctttagctttgccaacttttttcaaggtaccaaccgggtggcccccattttcaaagcgttcttcgtaggcaacaccatcacgcacaacgcggacggtcaaccattcggataaggcattgacgacactcgcgccaaccccatgcaaaccgccggatgttttataactgttttgggtaaatttcccacctgcgtgaagcactgtcaaaataacttcaatcgtaggaatcccagattggtgcatcccagtcggcatcccacgaccatgatcacggacactaatactattatccgcgccaattacgacgttgatttctgaaccaaaaccagccaaggcttcatcgacagcgttatcgacaatttcgtacaccaaatggtgcaagccgcgaccgtcagttgagccaatgtacatgccaggccgttttcgaactgcttctagaccttctaagacctgaatcgaattatcattataatcttgtttttgatttggcattcaagtatgactcctttgtttaaaaatgaacagataaggtatattatcaacaagtttggatgattttacaatcaaaaatttaaaatttcttgccaatacaaatgtatgttcgtattcacctattctaacatacaatattccttttcccttgtcaaaatgctaaaataggggaaacaaatgccacaaataggagtttttgtcatgaaacttagtcttatctttattcttgcgtacctgatcggttcgttcccatcaggcgttattatcggccgcgttttctgtcacaaagatccccgagatgctggaagccataatatcggcacaactaactcgtatcgcgtgctcggcccaatcgctgggacagccgttttatttcttgatattttaaaaggcacacttgctgctagcctaccgatgatttttcacatccccaatcatgcattggtcttaatcgtcggcttagcggccgttgtcggtcatgcttactccatctttttacactttacggggggaaaagccgttgcaaccagcgcaggcatcttactggcatacaatccacttttcttcgtaattgccagtaccatctttatcagtgtcatcctgattacaagtatggttagcatggctagcatcctcggtccattgatgattgcgattttatcgttttacacgcatgattggctactcggttcgattgcgaccttggtcttacttttcctggtctaccggcaccgcgaaaatctacaacgcattaaaaatggcactgaaaacttagtgccatttggcctgtactatcgctataaacaaaaacatcgataactaaaaaaacgccgaacgggcgtttttttgtgcaatcagttaaagatcaatcaattgttcccgttcattgtaaaatgatcgataagctaagtaacacgcaatcactgaaccaagactcgttgccgataataacataaaggtcactaatatctggtacataatggccttgactggatcaattccggcaaaaatcaggcccgacatcatccctggcaggctgacaagccccatcgttttagcggaatcgatcgtgggtgacatccccgtacgaatactctcacgaataatggcaattgatgcttgtttagcggtcgctcccaaggcgagtcgttccaaaacaggttgccgttcatccttaaattgcgccagtaagctgcggtaactcaagccaatggcgaccatcgagttggaagcaatcatcccagtaattggaataatttgcgatggaataaacttaatcgccccagataaaacaagtaatcctaacgtgaccccagtacttgttaaaattgcgataaatgaaattggaaacccgttgcgtagtttccccgcccgctttttggcatttgctgcggcgttaaaaataatgatcagcatcatcaataacgttagccacacatcgttaatatgaaaaatgaatttcagtaaataaccaacgataaataattgaatgattgcgcgaaaaacactgataatcatatctttttcaagaccgattttttcatggaagctaatgactaatgcgacaaacactaatgtcacagcaaacgtcagtgaaagaccattaacggctaagttcatcttgatttaccaattcgccagcaacaatttgcacctggcgccctttccgttgtaattcttctgtatcgtgggtaatggcaataattgtgagcccgcaatcctcattgaggtgctggacaaacgccaatacaattgccttattagcggcatctaaaccagtcgtaatttcatcaagtaataaaacttccggtggaaataaaacattacgaatcaaggcaattcgttgcttttcaccgcccgataacgtggtaatttttttcgttagtggcatgttggctaacccaaccgctgccaacgctttttcaattgctgccatatcgaccggtaaattacgaatctcgtatggaaaacgtaaattatccccgattgtttcaccaaataacgttgcttgttgaaaacaatacgaaaccttttgtcgatactgattgggactaaactgggtcagtggctgatcatttaataaaatggtgccacgtgtcggcgttagtaagtccgcaattaaccgtaacaaggtactcttaccacccccagaaggtcctgtaatcgttaagtaactgcctttttcaacggttaaattaatgtcggttaaaatcacttgttgatcaacctgataagataatcgttcgatttttaattgaatcataagtccctcctgataattatttaattcatagtatacacgaaattcacttaattagtgtcttctgctgattgaaaaaaggacacctaaaagcttatactaatattaggatatattaagtgatggacgttccgtccgctctggaaaagagatgttgataatgttaaatagctttccgcaagtcatgacaattgccggttccgattctgatggcagtgccggtgcgcaagcagatttaaatactttttttgcccgtaatgtttatggtatgagcattttgacagcctgtgttgctggaaattcatatgggattcgtgctagccaagcactgtctcccgactttattgatgccgagtttgaagcaattgcagccgactttcaggttcgcgcttgcaaaacaggaatgttaaccgaccgtgagaccattctaaccgttgctaatcagttgaaaaaacatgactttggtcccctagtgttagatccggtcattattaccaagcatgaagcattgttgttggcagatgatgcttttaacacactaaagacagaattaatgccccttgcaactgtcctaacgcctaatttctacgaagcgcaaaaattaactggtattgaactgaagacacctgctgatttccaagctgctggccaagcactattggcaatggacgcaaaaaacgtcatgattaaaggccatcacgaggccggacaatcaatcgttacagactacgtttgccttgccgatggacaagaattttggctatcagaaccttacgttgaaactacccatattaatgggacgggcgattcactttcagcttgcatctgtgctgaaatcgctaaggggcagacaattgaggctgccattaagaccgctaaacaatttgttcaccgcgccatcgctaacccgattgaagtcggccacaagtacggtccaattaaccaccatgcttaaaatacaaaaaagcccatggatttttccgtgggctttttgaatgtttagtgttctgcttcttcaatatcggcattgacttgttgtaagtcaaagtcactctttaaaaaagcttcgttatcacttgggaagtgctgttcaaacgtttcaaacggttggagcgtcatttgagcatcgaccacggtatagtctagaatatgaccgccaaagtcgtgcgtatcgtttaagaagtgtacgtgatagcctgcaacagctgcgccttgataaagcgctggtgcataatacccaatcaacgtgcccgttacgtctgtttgttcaaactccggttgcactcgggttgcagcagtcaaattcggataaggctcctgttgtgtttggacggcccgcgtatgcatgactttgaaagtcccagtcattttaaccgcaaaaaacaagttttttaacggtgcttgcgctagaatttgcgtttctaactcagcctttgtgcgttgatgaaccgcttgtgtaggtaatgatgaatcttgccaatgcactgtcgcaaatggaactgtcgcatcaggtgcgagttcagtcacttggccatccccattcacagtataagcatggccatctaataagaccagttcgccagctaaaccgtgcgccgtcccgattccaaaattcccatgggttaataattcagcaacggtcattgtccctgtaaagagtcccggaattaatagggctaacgttccgtgttgataaacgcgtttgacatcatttgtcattgattttcctcctcaaattaaacgagttggtcaggtaataatgcttggcctaataattgattatctttgtaatcaacgggcacatctacaaggacgggaccatcaatggcaaaggcttgatccaatactttaccaagatctgcggctttttcgacccgtaacccggttgcaccaaaactctctgcatattggacaaaatcaacgggaccaaacttaacggccgctgattcgccatatttcatttcttcttggaattttaccatgtcataataaccgtcattccaaataatatgcacgatgtttaagttcagacgcaccgcagtttctaagtcttgacctgagaataagaagccaccatctcccgaaaccgacacaatttgtgtatttggccgcactagagcagcactgatcgcccatggcaatgccacacctaaggtctgcatcccgttactaaagagcaagtgccgtggttcgtaacttctaaaatgccgcgccatccagatgtaatgactaccaacatcgaccgtgacggtcatttcgtcggtgacccgtgcttgcagttctgaaataatgttcaacggatgactaagtggattattggtcgtcatttcaggtgccgtgtcacgttgattgagttctgcgtgcaattcaactaaataatcacgcacatcgcccgctagttgataccccttcatataaggtaataaaaagtctagggtctgcgcaatatcgccgaccaattctttttcaggttggaaattatgatcgatttcagcgcgcatatcatcaatcaccataatgtgcgcatcactttcagcgttccagttacgcggttcatattcgattggatcatagccgactgcaataacaagatcactgcgttttagaatgcggtcgcctggttgattccggaataaaccaactcgcccataaaaatcagtctctaaatcacgcgaaatgacaccggctgcttggaacgtttcaacgaccggaatgtgggtttcagccactaaattgcgaatcgctgctgtcacttctggtgaagaagcgcgcataccaactaaaagtactggtaattttgcttctttaatccgttgtgccaaaagcgtcgtttcaacgggactggctggccctaatttaggcgccattagcggtttaatcactttagaatgaacttctgagtccgtgacatcttgtgggatgctgacaaacgttgcgccctgtttagcggattcagcttcttgataggcgttagcaatcacttctgataaattctcaggttcttggacttccgcactgaattttgtgattggtgcgaataaagcggcattacgcatgctttgatgcgttagtcgcaacaaatcagcgcgtttcacttgaccggcaatggctaagactggatcaccttctgccgttgctgtcacgacccccgtcgctaaattactggcaccagggcctgaagtcgccattacaacgcctggtttgcccgtaatccgaccaatcccagccgccatgaaggctgcattttgttcatggcgcgtcaaaattaatttgggcgtctttggattaacgggatgttctagtcgttcaaaaacccgatcaatcttcgcacccggaatcccgaacacgtactcaacatcatgatttactaaactatcgatgatggcatccgcgccgtaatacttcttttcttcagtcatgacttaccctacctaacctatgattttataacttatatcttagcatggaactactggaaaaactagcagagtgcgtttagaacgcgttacccgcctacagccagtttactaaaaaaacgcactcaccatcttggtaagtgcgtttttttaatcattcattaacgaacagtaatttcataacttgcattaaacgtttcacctgcagccagttcgttgacaccaaatttttctgaaaattcaccgcttgcgtcaacggtatccgcaatcccccaccaaggttcaaggcacacaaggttgccttctgttggataaggtgaccaaacaccgatgaatggggcgccagccaatttcatggtcactgagtggtccgttttttcagaacgaatactgaattcattggcttgaccctttaattcgtagattaaggcgtcatttttaaataattggtgattgatatccgttgcgacgtcggttggtgctaacgtccggtcgttcaaattaatgaaggccccttgcaatgggatcttaacccgtgatttttgtgggcggtagtctaagaaataatcttcaaattgcgtgtcatccgttaatgggactttaaatcctggatgacccccaattgagaagtacattggcccgcttggcgcaacattgcggacgtcatagccaaccgtcaaatgcatatcatgaacacgatagctcacacgtaattcaaattcaaatggatacacggcccggctgtcagcgtctgctttcaacaagaaagtcacggcgtggtccgattgttcttcgatactgaattcgcgatcacgtgcaaaaccgtgttgacccatcggataggtttggccattatacgtatattggtccgcttttgaacgccccacgaatgggaataaaacgggtgcgtgccggccccaaacatcgggatcagcttgccataaatattcaagccccgaaacggcgcccttaatactttgtaattcggcgccttttggactgagggtcaccgttaaaaattcgtttgcaatttggatcatcttaaaataccaccttttaaaaattatagaataaagcgggttaaatctttatcggctgcaatattaccgatcttatcgttgacatattgttctgtgatggtgatatcccccatctgcatgtcaggaccttcaaagagaatatcctctaatagcttctctaagatggtggccaaacgacgcgcaccaatattatcggtatcatggttaacttggaaggcaatcgcagcaatgcggccgattgcttccatcgtgaaggtgacgtgcaccccatcggcgccaatcaacgccatgtattgttttacaagtgcgttgtttggttccgttaaaattcggatgaagtctttttcagttaaatcttcaagttcaacccggattgggaaccgtccttgtaattcagcgattaaatcgctgggttttgattcagcaaacgcccctgaaccgataaataagatatggtcggtcttcaaaacaccgtatttcgtattgacttgtgagccttcaacgattggtaaaatatcacgttgaaccccttcacgagagacttcaccagattgttttttgccaccagccgtaattttatcaatttcatcgataaaaataatcccggtattttcaacacgttggagcgcatcatggtaaatatcggcatggttgactaatttagcggattcttcttgaatgaaaacttcacgcacttctttaaccgttaccgtccgcgtaatttttttcttcggcataattgaacccagagtatcgtttaaatcaattcccatctggcccatcatatcgttcattggggcaacttttttcggttcatcaacttgaatttcgatttcccggtcatctaacaagcctttatctaactgttctttaacagataaccgttcgttacggatatcatccgtcacttcttctggttcagtttgtccgaaaccagctggtgtttcccctttttgaagcgcgttaaacatgttcattaaatcattcatgttgttattgttcttacgttgttcctttttaatgcccggtactagtagtttaaccaagcgcttgtctgcttgacgagcagccttagcacgaacgtttttaaattgttctgtttcttccatatgcacagccacatcagctaagtcgcggaccattgattcaacgtcacgtcccacataccccacttcggtaaatttagtggcttcaaccttgataaatggggcatcgacaactttcgctaaccgtcgggcaatttctgttttcccgaccccagttggcccgatcattaatagatttttaggcgtgatttcttgttgcatttttgcactgagttgcatccggcgataacggttgtatagtgcaaccgcaacggcttttttagcttgatcttggccaatgacaaattgatcaagttcggcaacgattgttttgggtgttttattcattaagtccattgtgcgacctcctaaaatgattcgacaatcacgttgtggttggtgtaaacatcgattccaccagcaatatcaacactggttgtgacgattttttcaacggataagtcatcttttccttcaagtaataatgcggtagctgctgcttgggcgaaattgccgcctgaacccacggcaatcacttgatcacctgattccgatagcgtatcaggggtgatgacttcaccattccctgaaattaataaaatatcagtcgcattgaccgcaatcaacatcgcttctaatttttgaagcgttggatctttacgccagtcttgcgctaaagcaacagcagcatgttgcaggtcgcctgaatacttttctaatttttgttcaaaccattcttgtagcgtaaaggcatctgcaacaccaccagcaaagccgattgcgacttgattaccataaattcgacggacctttttagcagaatccttcgtcacaaatttttcgcccatggtgacttgaccgtcaccggcgatagctgttttaccattatgtttaactgcacaaattgttgtcatatgaattactcctaacgttgtttggggattgggcggggcttaacgtgcttttcaaactaactttctgcgcttagcgctgtgaatcaaatcagcgactttatcgctaattcgcttccctgtgctagtgctcaaaagttgaacaagcttgaaagcacttacttttttcttaacgtgctttcatcaactgctttctacgctttgctacatctgtcatatcaccggcgttgccggtaatccgcctgattaggcaaatgctcaaaaacaacccgttgatgacgcacttctttcttaacgttcttttcaaaccatgttcttgcgtttagctacacaagtcaaacaattgcttccagtaatcattcgccttgttaggctaattctcagaacataaccggtttgaacgcacttctattttagcagtctttaagactgtgtgctaatattagtctatttttcgttgaaaaaaatcaaactttagtccgagttttacgcgcggggaaagaattggcggtaatctttttgtaaatgggctgtggtgacatgggtgtaaatctgtgtggttgataaactactgtggcctaataattcctgcaccgttcgcagatcagcaccgtgatccaataagtgagttgcaaaggtatgccgaatcatatgcggatgaatgtcactcgttaaacttgttttcttgataatctgatctaaaatgtattcaattccccgacttgtaattggcgctccgagatgattaacaaaaacgacatcgtggtccaattgttttttggccatcaattgaacacgaccaacttttaaataagcttgcaaggcacgttcagcatggtgcccgaatggtacatagcgatctttattgccctttccatgaacaagaatgacgcgtaagccgaaatcaatttgtgctaccgtcaactgcgcgcactcactcacccgcatccccgtcgcatacagtaattctaagatggcgcgattccgttgatcgagtggttgatccccatcaatggcagcaaatagcgcgtccatttccttttcgtaaaaaaaccgcggcagcttatgctgttgcttttttaattgaacagcttcaaaaggatcggtttgcacgaactcatttttcactaaataccggtaaaacgaccgcaaactcgaaattcgccgcgcgacagtttcacgactatattctttttgatccatttcattcaagtaagtctgcacgtccagtggcgtgacctgtttaaacgacgctaagccgccgttagcggttaaaaaagcactgaacatctgaatatcagcttgataagctttttgggtttctggcgagtaatgccgatcgaccactaagtactgtaaaaaaagattaagccattcttgttctaacgccaaaaaaatccctccaagcttgattagtattactttaccacaagcctggcgggatttaaaagattctaattaaagtgtcgtcttaaattggtcgatactttcaagtgcgcgatcagcaagtgcttggttccgttcctttttatcgcgaatccgttgtttcaaaggttcgaaaatcccaaagttcgcattcatcggttggaaatgtttggcactcgtatgggtaatatagtgcgccattgatcccatcgccgtatccgttgggaaaacagccggtgtttggtccaacgccagtttagcggcgttaatcccagccactagtccagaagcggcactttcaacgtagccttcaaccccagtcatttgaccagcgaagaatagatcgtcacgttgttttgattgataggttggtaataaaacatctggtgatttcatgaaagtattgcgatgcatcacaccataccgcacaaattcagcattttccaaaccaggaatcatgcggaaaacccgtttttgttcgccccacttcaaatgtgtttggaaaccaacaatgttgtacaaactagcagccgcattgtcttggcgcaattgcacaacggcgtatggttgtttgccagtattcggatcttccaatccaacgggtttcaaaggcccgaataacatcgtcttaatcccgcgtttggccatcacttcgattggcatacagccatcaaagaacttttcttcttcaaagtcatgcatttctgcaacttcagcgctaatcaaggctttgtagaagttttcgaattcttcttcagtcattggacagtttaagtaagcagcttcgcccttatcataccgtgatttgaggtaaactttatcgaaatcgatactgttcttatccaaaatgggcgctgcagcatcgtagaaatacaagccatcactgccgtttaaggcactgattttttcagctaagccttcggacgttaatggaccagtggccacaatcgtaggaccttctggaaaatcggttaattcttcatgatgaactgtgacacgttcatgattggctaagcgatccgtcaccgtttgtgaaaacggtgtgcggtcaacggccaatgcgccaccagcaggaacggcattttgatcagccgcactgatgattaatgagtccaagtgacgcatttcttctttaattaagccaaccgcattggtaatttggttcgcacggagcgaattcgtacacactaattctgcgaattgttctgtatggtgcgccggtgtcattttaacgggacgcatttcatagaggtgcacattcacaccgcgttgggcaatttgccatgctgcttctgaaccggctaatccggcaccaatcacgtttacaaaaggttctgtgctcatttgctagtctccatttttctaattatttttggacggtttcttcgtagtcaccgtttggacaaattacttgtttgccacctttaattttcttttcaacaaggtagtgttcacacttcggacagtttctgccgacgggtttatcccatgtgacaaaatcacaatctgggtaacgatcacaaccgtaaaataagcgattcttcttcgatttacgttcgatgacttgccccttaccacatttgggacaggtgacgccgatttccttcacgattgccttggtattgcgacaatctgggaagcgactgcaagcgaagaatttaccataacgacccattttaacaaccattggggcaccacagatgtcgcagtcaaagccagctggttcatctttaatttgtactttttcgatttgttcactcgctttttcgacttctttttcaaacggtttgaagaagttgtcaatcaccttgacccagtcttctttacccgtttcgacttcatccaaacgatgttccaaatcggccgtaaagtcgatgttaacgatgtccgggaagaattcgacaattaaaccattgacgatttcccctaactcagttggttcaaagcgttttgcgtttaacttcacgtaataacgccgttgaatcgtttcgatcgttggtgaatacgttgatggtcgaccaacaccgttttcttccaaagccttaactaaattggcttcagaataacgtgctggtggctgcgtaaaatgttgcgctggatcagttttaacgagtttcaccgcatccccaactgcaagttctggtaagacattatccttagcagagtcttcagtatcacgtgatgacacatagagtttcgtgaatcctgggaacttcatttgtgagccgtttgccttgaataagacatcaccttgagcaatcttaactgcgaccgtatcaaaaatggctggtgtcatctgactggcgacaaaccgtgaccagattaagttatagattttatattgatcgttagttaaaacgtctttcaagctcttaggtgtccgcatcactgacgttgggcgaatcgcttcatgggcatcttgtgcaccttcaggattcttcgtcttatgcgcctttaatgccgcatattcttcaccataattgtcatggatgaattgtgacgcttcatgtttagcaccggtagaaatccgggttgaatcggtacgcatataagtgattaacccgaccgtgccttctttgccaccaaggttaatcccttcatacaattgttgggcttgcatcattgttttccgcgttctgaagttcaacttacggttggcttcttgttgcaaggaactcgttgtaaatggtgcggctgcaaaacgtttgcgttcccgtttcttaacatcttcaatcgtgaaatccttagtcttatcgatttgtttcaaaatcgcttgaaccgcatcattatcgccaaggggtaatttcttacccttcacgccgtagaaactggcgttaaacttactgcgactctttttaaattccgcatccaatgaccagtattcttctggaacaaaggctttaatctcgttttcacgatcaatcacgagttttaacgcaacggattgaacccgaccagcactcaagccttttttaaccttttgccagagtaatggactgattgaatacccgacaatccgatcaagcacgcgtcgcgcttgttgtgcatcaacgagtttcatatcgatactacgtggatttttaaaagcacttttaacggtgtctttggtaatttcgttaaagacaacccggtttttttcagttggatcgagttttaaaatatgggaaacatgccatgcaatcgcttcgccttcgcgatccggatcggctgcgagatagatatgatcaacttttttagcttgcttttttaattctttaatcgtttcgcctttaccgcgaatcgagatatatttaggttcataattattttcaaaatcaacacccatttgactctttggtaaatcgcggatgtgacccttgcttgcaacaaccttatagttgcgcccaaggtacttttcaattgttttggcctttgcaggtgattctacaatgactaaatttttgcctgccatggacaaacccctttcaacagaacgctttgttcaaatcgttcattagcataaaacactaccttgacgattgtcaactgatagtatgcttgatattaacagcttaaagcatagcataggtttggcagtatgccaaagagaaattgttttcaaacgtacaaatcacaccaaaaatcggggttcaaccacttggtcgaaccccgatttcttctattatatagtcgccagataaaaaacttagactgacaaactatttttttgtgcatcgcgttcaagaatccccgcaataatttgatcaagggtgatggttgccatctccgcttccgcagctttttgcacctgatcataagccgcatcaagggttgcttgaatgttgctaccaattaaacaatctggatttgttttttcatcaacgtgtaataaccgttgatctgtatcaagcgcctgaaaaacggctaacattgtaatctgttccgctgggcgcgctaatttaggggcaatcgtccccggtttagtcgctaataaatccgccttcaccagtagtgacattagccgccgcactaaactaggattagactcgatgctcccagcaatcgcttggcttgataaatcaccatcttgaaaaatatcgacataggccaaaatatggatggcatcactaagtttatgagaatatttcatggttcaaccgcctttttgaaatcaattcaggcttatttaataatcgtctgtaacgcttcttttaatgaaggtaatggtcggcctaagacatcgggtaaatcagaagtggtttcatctaaatcaccatcttgaatcattgtttgaataccagtgacaatttcagcgacttcagcaggtaagccgttgtcttcgaggctttgacgataatcagccgcatctaatgatactaccttaaattcttgattagtcaactcgctaatcgcttgagctaaatccgcataagtggctggcgcaccggaaaattcataaatcgcttttggttgatcgttgactaataccttagccgcagcttcagcatagtcgtgttcgagtgcccaaccaacatgcccttcaccagcgccataaacaaatggttgacctgctaatgcgcctttaatgctatccatttcgttttcaagataccagttattgcgtaagaatgtatgatcaatgcctgatgctgccaatgctttttcagtttgaatgtgatcacttgctaaagcacctgttgcttgatcagcgtgtgggaaactcgtataagcaatccacttaacgccagcctttttagcagcttcaatcacgtttaaatgttgttgcgcacggggcacatcgccaccaggttgtgaggagatgaataataaccggtcaacgcctttgagtgattccgttaatgtggcaacatcgttatagtcaccgggacgaacggtcacaccagctgggaccattttagtggctttttcagtattccgtgctaatccaatgatttgttctgctggcactaagtcagccaacgtcttcattgcgacttgcccaaaacgacctgtcactgctgtaattgcatatttcatattaaaaatcccctttgaattccatttgttactttataagtaacttgtgactttaatattaacaacatgccgcagaattgtcaacaattaaccctcaatcaaaataatgcaactcgtccaataacaattgttgatttaaaagcggtgttgcaccggctaaaatcagttgattacagcctgccgataatgaatgattaacctggcccggtaaggcatatacgttacgattggcttgtaatgctaaattagcggtgattaagctaccacttttttggcgggcttctgtgaccactaaactatgacaaagtccggcaataatccgatttcgggctgggaagtggtgcttcttagccgttacgtccaaaccgtattctgatatcaataaccctttttcagcgaccgcctgttgcaagtgttcgttttgtggtgggtaataacaattcaagcccgttccaatcacgccaatcggtcgtaaccctttttggagtgcaacttcatgcgccatcgcatccgccccttgagctaaaccactgataatcgtcgttgtttgtggtaatcccaataaatgctgcagggcttgcttagtatactccgtggcttgccgcgcaccaaccaccgcaacacatggctgtttcaaaacacttaaatcgccgcgataaaataaaactgttggcggacaatgggtttctaacaaccgttgcggataatctgcttctagaatcgtcagatactgaacataacgttcatgcgtggcacacttctgttgcagagctagactgtcaaaactagtctgaaaggtcagccaatatcgctccggtaaacacgcaatctgcgcaatctccaatgccgataaagcccaattgtgactcgttactaaccatgcggctaagcgtaattcactgatggggccaaacccatctgccaggtgtactttcaataataattgctttttagtcaacacaaaaaaacagctcctttacgtttatcttcgtaaaggagctgttttattttctatagggcgtctttaacgggcgaaaaactgcggcggtgaattggcgtaacaccgaattcagctaaaccagcgagatgtttcgctgtcccgtaacccatattattagcaagatcgtaacccggatactgttgatcataattaatcatcaattgatcccgaatcactttagccacaatactggctgaggcgatactaatactgcgcgcatcccccttaatcaatttttcttgtgggatgtctgtcggcacggtcattgcgtccaccaataggtaatcggggtgttctgctaaactagcgacagcttcgcccatcgccagttccgtagcgtgatagatattctcttggtcgatccgtggtgcatcggcaatcccaatgctgacactgatggcttgtgccatgataccgcgatacagttcttgtttcaccttaaacgaaagctgtttagagtcgttgacttgccataggtcaaaatcatgtggcaaaatgacggccgctgtcacaactggacccgctaatgggccgcgcccaacttcatcaattccagcaatcaagggataatctggccataaactttcttctagctggcgtcgttcgataaacgccgctttttgcgccgctaacttagccatccgcttgtcatattgaacgagtaacttctgcacgccagcacgcgcatcactgcgtaagagcgccacttcttcctctgaaatgtcgtctaataagcgtgccttaatggcagcaattgattctggtttggtcattagtgcgcctccacaggaacgatatcgagtgtaaagcgccctaacttacccttacgcgcgtccgtgatgaatttcatacagaagcgatcgtagtcttctttaaaacctagtcgtttggtcaatgccatgattaaatcaggcgctggcatttcaagttcagccggcgtcacatggtattcttttaccaattgttgcggatagaaatccttgaaataatcgagggcatacaccacaacatcatccgggtgataaattgcatccgaaatcgaaccagttaaggccaacttattgccgacagctggatcttcgaatttaggccataaaacccctggtgtatctaacaattcgagtgattggcccgcttttaaccattgttgattcttggttacaccgggtcgattacctgttaccgcaatgtttttttgcaccaagcgattcaaaatcgttgatttaccaacgttaggaaccccaacacacattgcacggatcaccggattaagaatcccttttgcccgttttttagcaagtttgtctgccaaaatttcttgtgctactttttcgatttgcggtaattttgatttatgttgcgcatcaagcgcgattgctgtaatcccccgttttttaaatgtttcaatccattgttgtgtgcgtttggcatctgccatatccgctttgttcataatcaagagcgtcggtttgttttgaccaagttctgcaatcatcggattaatggaagattctggaacccgtgcatccacaatttcgagaatcaaatcgactgctttgagccgttctttaatttgtttttgggcctttgccatatggcctggataccattgaattgtcataataactcctttattgctagttaagcgatatacatcattcttaatatttgtcactgattgtattattcttaattctatcatacctgatgtctggctgacgggttaaatttaattccggactacaacatccaccaattaagcgtatcattttttcagttaagcatcatattcagtacatttcatacgatcattagcactcgataatcaaaaaagctgacacactctagagtatgtcagcttttaattattattttaaagattgtatatctttaatcggccagtagaccgccactgctcggcctaatattgtatcgcggtggatcgtaccaaacaaacggctatctttgctgatctggcgattgtcacccaatacaaagtactcatcttttggaatctgcttttcgccgattaaggtttttaattcaaaatctgatgttaaaatccctggtttctttttggcctgattcaagaatggttcgtcgacatgccgtccattgatgtacagctggtcattgcggtatgcaacggtttcacctggcagaccaatcacccgtttcacataagttgtttgatcagctcgggtgaagacaacaacatcaaagcgcttgatgggcccactagtgcgtaataagagttggtccgctgactcaagcgtcggggccatcgattgccctgacaccgatgcggggaccagaatgaacgaccgtaacacaatcgctaccgtcccagccagtaaaaatgcgagaagccaatagccggtaatggcccatccccgccacaatttctgcttcggggaagtcattaggcttgttcgctttcctgataggcttcatacgcctcatcaaaaatcgtcatactcgggaggtagctgccattaagttccaaatagcgcgttaatgtttcataatcgccgctttgtttagggaaagattggtcaaaaaaggcattgttggcaaattggggaactggttcataattattcggatcacgttgggtcatgaggtaacgataaaaactctgcttcatctgaacaccttatttcttattttttagcgggatatagacgtttaaatcaatcttatcattcttcaaatcgatatgtttagcagttacttgcatcccgttttcgagcttgaactcatttaggcgtaatgtaatccggctcttgtgtgcatccaaaataacccatttggggaatttgtattgacgcttgatgtaattaaagacaaacgacatgggcaccttcaattgtccgactgctaattgtttggcgcgtaattggacgtcgccattttctaaaacgtacggttcaaaaaagaggttgaattcgaccggaaaccctaagaacttgaattgaccagataaaatcgcctgctgatccagggtgagttggtatttaatctttgaatcttccaagtagttttgtaaataataggtgactaaactattgatttgtctcttatgcatctgaatttcaaaagtgctatcagctttgatgattttctcagttttaatcatttcagtcttaggggctgtcacgttgtagccgacaagaccaactgtcccgatcacgactgctaataagacgatgaaactgtatttccaataattgatggtccgtttagttgttgttttctgtgctgcttgatgtgcttgtctggttgtcataacctatcctttctctaatcccacgtttgcttgtgtgctttcatcacttgccaaaaggcctttgtgacccattgataacctttatgattgggatggaaatgatcatctggactgatataggggttcaaatgctcgttagccgctaatgttttttgcaactgtgcactatccattttagcgagcgatttagtctgtttgacaaaatgcccatcgccccgtgtcaacatccgatcactattgacataatacgtatctttgaaatcattagcaaccgttttggcggtctgattccactcagcaaccgcctttgacatcccagtgatttcagggaaatagacataaaacggattgtagacccccatgatgaaaattggggcatcaggattatattttctaatttgcatcatcagcgtggttaaattcgcttgatatttttgctgaccagtcgtaatccgacgttgattcagctcaaaaaaattattctgtaaaactgccattaggtcgttgcccccaacagttagcgtcacaatatcagcttttgccaattgctgctgtagcggcttttgtttctgcacgcgtttagtaatctgtacactggtatcgcccgtcacaccgaaattggcggtcttgacgggatgcttggttgcttgctgaatctgattggcaactaatgacacatagccttctttgttggtctcatcaccaacaccatgcgtcaatgaatcgccaatcgcaaccaactgcaacgtcttttttggttttggttttgatttgatcactttatccgctgaagacgttgatgttaccgtcttaggcgcttggttgggccgtggcgttaatagttgccagataataaagaccactaaaatcgcaccagcaaataagcctaaatcaattaaaatctgtcgtgctttcttcaaacgtgacacctcggttatttctagataatagttaaggctgggacaattaaatgtcaaccagccttagtgtgttaatgcattaattgtaatcttgttaatcctctgtgtagtacataacggcaaatgcgcctgcacccgcatgcgttgcaatcactggatcagttgtccggacaagaatttcgatgtttgggaatactacttgcaattgtgctttaattttttcgctcaattctagcccatccgcatgtgaaatcccgattgcccgaatctttaagtcgcgcatatcagcttccatttcatcgatgaatttcgtaatggtcttcatcccccggcctttgcgtaacacttttaattcgctatcagccacttcaaggatcaccttgatatttaataaacttgaaatcacaccagccgcatgactcaaccggccccccttaacgaggttggttagatcagtcacacccatgtataacttcgtatgatcgtgtacgttttgaatggctgctaaagcatcatccatgctaccgccgttttcaatgacttctgccgcttttaacacttggaatgccattgcacggtcggtaaagtcgctatcgacaactgttacatctgctttcgccatctcgccggcttggcgggctgtatcaacagtgccactaattgctcgtagcatgtgaattgataaaatctggctgccatcagccgctaattgttcatacgtttcgacaaaattcccgattgcgggttgactcgtcttaggtaaggcactcgcacttgccatttcagtcataaattgatcgcgggtaatggtttcaccatcgatatacaccgtattgtcaatcataatcgtcaacggaataaccgtaatatgatgttctttaatttcttcaggagtgagttggatggatgaatccgttacaattttaatattagccactattacttcagccacgctttctatcttgaaatctgggcaatcaacggccccgtgatttctatgattatgtctattgacagtatatcaaacaatcacgcttttttcaccaaaagttactgattaaaaaaaaagccagttgtcacttttgtagcaagcaaaaaggcggttacatcgctgcgaccgcccttaattgaatctttctaacggcgttgatagatttcaaacgtatgcgcatagcgattacgttcgtccaccacaccaggtgtttgactgatcaattcgaactgatccatcgctaattttggcatataaacgttgccttcaaacgattcagcaatttttgtaacgtacagataatcgacatcatcggcgtacattgcaaaaatatcggcaccaccaatgataaaaatctttttcatcgggttggcttgctcatatttaagcagttccgctttggtgtgcatcacaaacaccccatcagccacagctaaatccggttgtcgcgtaatcacaatgttttggcgtccaggtaagggttggacgggtaaactatcatacgttttccggcccattaccaccacttcatgaaccgtttcgtgtttaaaattggcaagatcgttgggtaatgaccatggtaagtgaccattttgaccgattaacccattttgatcttcagcccataagaatgctaacattggcgctcctcctcattaaaccgcaacgggtgctttaattgcgggttctgcttcatagttttcaagtttaatatcggcgacatcaaaatcaaagatgcttgttttatctggattgagccacaattttggtgcggcatgaattgggcgttcaagctgtgtcttcacctgttcaatatgattactgtaaatatgggcatcacccaacgtatggatgaattcaccgacttcaaggccggtttcatgcgcaatcaaatgtgtcaataatgcgtagctcgcaatgttaaatggtacgccaaggaaaacatccccgctacgttgatacaattggcacgataaccgtccgtcattaacgtagaactggaacatcgtatgacaaggcggcaacgccatacttggcacgtcttctggattccaagctgagacaattaagcgccgtgaatcgggattggttttaatttgttcaatcacatttttaatctgatcgattgtgtccccagaacgggtttgccaagcacgccattgtttaccatagatatcgcccagttcaccatattgtttggcaaaggcttcatcgtctaaaatccgttcgttaaactgttgcatttggtcgcgataaacagtattgaaggccgcatcagtttgggcacgatgaccaaaatctgtcatatccgggcctgtgtaatcggcactttgaacgtaacgttcaaacgcccattcatcccaaatatgattattgtgttgtagtaagtaacgaatattggaatcaccttttaaaaaccacaataactcacttttaattaacccgaatggcacttttttggtggttaataaaggaaacccttcgtttaaatcaaagcgcatttgatagccaaacagactataggtgccagtgttggtacgatcttctttatagtgacccgtttctaaaatggtacgtgctaaatctaagtaggtttgctcagacatgatgtggattcctttctttaacgtgcttttcaagctaactttctgcacttagcgacgtatgccaaataatcgactttgtcgcttattcgtcacactaagctaatgcttaaaagttgaacaagcttgaacgcacttcttttaacgtgctttttgaaactggcgcttgcgcttaacgacatttgtcaaatcagcgattacatcgctaattcgccaaattaagttaatgctcagcgtcaaaccgtttcaaacgcactcagttttttaacgtgcttttaaaaccatgttcttgcgtttagctacacaagtcaaacgattgctttcagcaatcattcgccttgttaggctagtgctcggaatatacccggtttgaacgcactcatttagtttgcgtattcacttaagtattcccagcgggtcattttttcgtctagttgttggttaagttgatccatttgggcctgccactctgctaatttaccatagtccgcgccgtttgcgttcatttctgctttgatggtttcaatctgttcgtccaattgttccatgtcggcttcgatgtgttcgtattccttttgttcggcgtatgttaatttctgcttggtctttgcaactggtgcttcttcaaccgatgctgtcgctgctttaggcgctgacttagttggtgttgctttttgttttgccaagtaatcgctgaacaggccaacttcggtgctaatcttgccggccccttcaaaaatcaagagtttgtcggcaacttgatcgaggaagtaacggtcatgcgaaactgtgatcacagtcccgttaaagttttccaagtaattttccagaatcgtcaacgtgccaatatctaaatcgttagttggttcatccagtaataagacgtttggttgttgcatcaaaattttcaacaagtacaagcggcgtttttcaccaccagaaagtttgccaatcaatgtgccgtgcatttgacggctgaataggaattgttctaacaattgtgtgacactgatccggtccccatttttaccaatgacttcttcgccggcttcttgcaagtatgcaatcactcgtttgttaggatctaagtcttcattttgttgcgtatagtagccgaggttgacggtttcgccgacaattaactcgccactatcaagtgggaggcgttcagccaacacgtttaacagtgatgatttaccggccccgttgacgccactaatcccaatccgatcattcgcttgaactagaatactaaagtcatccaaaatctgacgatcgccgagttttaaactggcgttctttaattcgagtacttttttacctaaccgcgattgccccatctgaatatcgacttccgaatcgtctggtccagtggttaaattcgcctttaagtcattgaagcgattaatccgcgcttgttgcttggttgttcgtgccttagcacccgcgcgcatccacgttaattcttgcttgtagagttgttgttgcttatgggcagcttgttgttcacgttccaagcgatcagctttttgggttaaaaattgttcatagttaccgttatatgaatagagttgaccaccgtcgagttcaaaaatttggttcgcaacacgatccaagaagtagcgatcatgcgtgacaattaaaagcgcgccttgatattgtgctaagcgtttttcaagccattcaatggaatcaaaatccaagtggttcgttggttcgtccaaaatcaataagtctgggctttcaattaaggcttgtgccaacccaacccgtttttgttggcccccagataatgtattaatcggttgatccaaatccgttagatgtaattgcgtcaaaatcgtcttgatatccgtatcaaccgtccaagcatcttgttgcgtcatttgcgcatcagcttgttcgtattgcgtctgtaacttcggattagtgggatcttgcgtatatgccgccaagacgcgttcatagttttgaatcgtcttgaaaaccggattatcgccggcaaaaatcgccgccataatacttaagttcgtatcaaagcttggtttctgggctaaataactcatcgcgtattggttaggcgtttcaacctgcccgctatcgtatgaatccatgccggtaatcgcgttgagtaacgtcgttttcccggtcccattaatgccgactaaaccaatgcggtccccttcacggattaaaaatgaaatgtcttcaaaaagcgttttttcgccgtaagtcttcgttaaatgcgttgctgtcaatgtttgcaatatagtcacctttttactttcgttaccatcaatcatagcgaataatcagacgactgacaatcaaaatgacaaaaagaatgtcgtaaactgtaaacaaataaaaaagcccctgacaacgatcaatattgtcaggagctaacgtttaaatttcagggtacatatctgcaattgtgtgttctgcatcaatcacaatgtacaaccgaccatttttttgtgagatttggctactttgataaatattatctaagccactattatctttattcttgaatgggaaataaatttgcattggtgcgcgatcttgatcatcttcaaagattaaatcgagtttttcgatgtcttgatacttcgttgcacgaccgaacatccccatttcaagagaaccggtgttgatgtcttcggacttcacatgatccgcttcaggtaagatttcggctttgaaactcttgcaagggtgaatctcttgcattgggccaccattaatgcgaccataactggtggtaacacggctaatccaaatatcatttaattctttgtggctgacggtccaagcgtcaccatttctaaaataaaatttcaattccttaaaaacatgttgtgtcatcaattgtcaccctttccgaatgtgcttacatggttattttaacacaccttctgagggaatggcttagttttgtgcagccgattgcaataattgggcttgatcgtttggtaattgatctaacaccacggctttttcgagttgcgccaacatttttcctagttgcggaccaggttgatacccattttgcattaagacttgtccattgatggcgagttccgccttttgcttgatttgcagtgccgcatactttgcttgccactgatcaactgcgactgattcgttggtcattaattgggcaacaattaacgtgatgtctaatacatgttgccccgcttgataaagggcccactgatcggctgattggtctagaatggctggcaataatcccaaacctgctttaaccgcatcgatcacatcgttagcactcttccagcgtttcaataatttgccggcggcggcgggggttttacccaataatgcattgactagtagccaagccgtatcttcatcatgaatctgttgcgctggtaatgccgctaatttggtcagtcccgctgcttcagtcgcgaacgctggacaatattgatacaacccggtttttaaaaaggtttgtaacccattttgccgctgaatcccttgtagcaacttcacaaattcgacatgaatgcgttccaccgcaattttcgttaatagttcagcatgtttggcaatcgcagtttgtgtttctggtgtaactgcaaagccgagttgactttcaaaacggacggcacgcatcatacggagtgcatcttcgtggaaacgttcgtcggctttgcccaccgctctgatttgttgcgcttttagatcggtcaggccatcgaataaatcaataatttcaccatcagcgcgcatcgcaagcgcattaatcgtgaaatcccgccgttgtaaatcttcggctaacgaccgcacaaacgtcactgaatcaggccgtctaaaatcttgatagccactttccgttctaaaagtggtcacttcatagccagtcccatgatcaagaatcatcacagtcccgtgctggattccggtatcgaccgttcgtttaaaaatttgcttcacttctgctggatacgccgacgttgcgatatcaacgtcgtgaatcggcaagcctaataaataatcgcggacactgccgccgacgaaataggcttcaaaacccgccgcttcaatttgttttaagattggtagggccgcttcaaattccggcgcaaaggtggttactttcatggctatccctcttatctaacaattaactgtttctgatgctatttatcataccacaatcaaggaccccacttcagccaccaaagtggttccaactgtttttaacccccattccgtgctatatttaagttatgtaaagggggcgttgacatgacgaaacaacatacttggcaaacgactagtcgtgatttagcggtgattgcgctgggctgtgcgatctacgcgtttgggctagtgaccatcaacattcaaaatcacctggctgaaggtggcttaaccgggattaccttgattttacggtattggttgcatatcgacccggcgtattcaacggctttgttaaatatcccgctaattattctaggctatcgttacctcggtaaacgcgcactcgcctacacgatttacggaacggcgatgatgtccgtttttctatggatttggcaacgtgtccccatcacaattgatttaaaccacgatattttaatcgccgctattctagccggtttatgtggtggcttcggcagtgggattatctaccgcttcggtggcacaactggtggcaccgacgtcattgcccgcattatcgaaaaagaaaaagggatgccaatgggccgctccctccttctttttgacgtcgtagtcttaacactctcactcagttacctcgatatcgaacatatgatgtataccttaattgcgtcttacgtcttctcccggattgtgaacttcacactcgagggtgcttacgccgccaaagggctactcgtaatcagtgaccacgcgcaagcaattgccgatgacattctggccgatatggaacgcggcgtgacgtttctacaggccacaggcgcttatgcccatcaagaccgaccaatgctgtactgtgtcgtcagtccaagtgaaatcgcctatcttaaacggttgattaaccaacatgacccgcacgcattcgtttccattattgatgtgcacgaagcactcggggaaggctttacgtacgactaatcaataaaaacgccagcgattaatcgctggcgtttttaagtgtctttatgataattcctgtccctcagttaactcaatttctttttcaacttcttcaaccatcacaaaatatttttgattgcgcagaacaaagaaaatcccaattaaaatcattaagctcgcaaaataaaaagtccaatgcgctgaccatttctcagcgattttaccagcaacaaatggtgcgattgccccgccagtaaagcgaataaagctatacgccgatgatgcaacactgcgttcaatcgaatcattttccatcgcaaccgtcgttaacaacgtattcaccaagccttggaagaaaccagcaatgatgacgccaaaggccactaaggctggttgatctgcataaataccgatcaccattaagcagatcaagaaaaagcttaacccaaacaacaacgtcacaagggtattcgttttttgttccatccgtggtgcaatgaaaaccgatgcaatggctaacatcacgccccacccgaaaaagacaaaaccaacttgcaattcagttaacccaactaataagaatggtgcatacgctaaaatcgtgaaaaacccgaaattatacaataatgcaataatcccgattgaacgtaaacgatgattttttaacgcgacagcccctgcaaaaaaaggcgcccttttagcaggtttagcaatcggttctaatgaaaccatgatggtcaacgccgcaataaacatcaaaatggcgacaccataaaacggaaaacgccatgaaagactccctaagacgccacccacaagtggtccaacggccatcccaattcctaaagatccttcgtataacataatcgcttgttccgttttttcaggcatcacactgacaatcgcagtcaaagcggttgataggaacaaggcgttcccaaagccccaaccggcccgtagcgaaattaattgcgtaatggtctgtgaacgaccagctaacgccgcaaataaaacaataatgatcaaaccaatactaatcgtttttttcgcaccaattctagtggaaataaaccctgtaaatagcataataatccctgtgaccaacatataactcgtaaatagtaaggtcgtttgcgctggtgtggcatttaatttaaccgcaatcgtttttaaaatgggatcaactaaaccaatccccataaatgcaaccatacacgtaaatgcaacggcatacgccgagcgtagccctttattttgattctccagcaacatatcactctctttctctttatataaactacattagattgcaaaacatatcaatttttacattaaaatttgacataatatagtgacatgtttgttgactctaaatatggtatactgagcaataattaatcgattaaagggtgaaataatatgagtacgcttagctatattttattatgtatgttagttcgcaaaccgtgtagcggctacgaattaaagcagtacattaatttattttgggaagcacaccacagtcaaatctacacggcattaaataaactgcacgaacaaggctatgtcacggttaaaattgatcccgttcataaacaaaagaagatttatcatttaacagaagccggccaactcgtcgttactgactggtttcaagaagaaacgaatttacccacacaacgtgacgagtttttagcaaaagtttacgttatttcactgttcaatcaagaacaagcagctgacttactccaagatcgccgccatcattaccaaaaaattcaaaaacaataccaacataagatgcaagaatacaacctcataaccgatcccaccgaaaagcaaaaaaacttaggtcgttacctgattttgaaacggcgcttaatggtctgcgcaacagaattagaatggtgcgcgtgggcgcaggacattcttaaccgcaatcaaaaccaataaaaaagacagctaatgcacttaaaaatgcactagctgtcttttttatgctttagttaaacatttcccacaataaacacgagctaaattaactatcgttagcaggcaaagcatactaacggccattaaaaacggtccagcgagcaaagccgccattgagatgggtgcttggtacaaaatggttcgcccgacatgaatcgtcaggctccaaactaagcccccggctagtaggctgactgcaagacaaacaccaactaagatcactgcatgcgattgttgtgtcagcaatagttgctgttttgttaaaccgagcaactgtaattggcgcatttgctgggcattatcctcttttgcgactaacagcgtcgccaatacattcgctaatacaatcagtaacggcgcgcccaaatataaaccaattgtcaaaatgaaattcaccaaacgttcattgttggcactcgtggtatttgtataggccggtatattccacataattgccgacatccccgtaattaaaaccgcaatgaccgtcactggcgtatacaacggcaaatatttttcagcagtatagtcaatatcatgggctgccatgttcaaaaagagcgttctagcacctaaccaatagagcacgtggctaattaattttaataccgtgtgtccggtaagcgcaattagaattaataataagaacaacacgagattcaggttgccaaccgaattgccgagactgccaattgctttctcggaatgaccgacataggttaacgccatgctttgcatcgttagtttaataattaacccactgacgaccattaacgaaacaatcgtcctaactctacgaacgatccgccgtcggtgactgagatgcttattcccatcttttagttgatggcgtgcatgccaaaaaccaccactaccggcaattagactaaccaagacaaccgttaacaaaagtgccaagaacgaaaaatgaattggcatattcggcaacatttggggcccaacaatctgctgcaaccacgcataacaaaaacgcgttagtggcaaggcaacgactccgccgagcagagcactcaccccactgacaattccgatttaaatccccaaaatagcggccagtgcattgatcgttgcccctagaatcgcaagcattcgatagtccgttttaaactgatccaaaagctggtgcacgattcctttaatcacgattaccattgtaataccaccaaaaaataccggcatgataaaaatcggcaacggtgtattcggaccgtatagatcaacttgctgcgactgtgccacattcacaattcccgttaaacaaaaaccgaggattaaacccactgttacaaaaactggtattgttgctagccattgccgccaggaatgctttaactgtaaccaactgattgtccacatcgcttacaccacctgatccaaggcggcatagattgtcgcaagtgtcggttcagtcacaatttgctgaacctgaccgtcttttaatacaatcgcacgatctgtctgactagccagctcaatatcgtgggtcaccataatcaccgttctccctttagcaaccatctctttgaaatatgtaaaaataatcgctttggatgccgaatctagcgcacccgttggctcatcggcaaatagcacatcacaatcagttagaatcgtgcgagcaatcgcgactttttgttgctcaccacccgataaagtcgcaacaggcccatcgatttgtcccgcaaagttcattttggtcagtaactgtttaatctcagcacgttgcggttgctgatgactcaagcgctgttgtaagacaacattttcaaagacgggtaaagactgaatcaagttgtattgttgaaaaataaagccaatcgtctgtctgcgaaaagccgctagttgattgggtttcaattgatacggattaatccccgcaattgccacagtgccgcctgtaggtcgcgtaatccctgaaatacaatacaacaacgtactcttaccagacccagaaggcccaacaatactgaccaactcccctttttgcaccgtaaacgaaatatttttcaataaggttgtcgtctggtcagactgcccaattgacaccacttgtgttagttgggcaaccgaaagtattgtgtttgtcatcctaaaaacctccccaaataaatcctgttcccgattcctcttcaatgtaccactttcatctggggaagaaacgcgactaaagacgcaaaaaaacgctcgactaaagtaatagtcgggcgtttttttgcattattgcatggcttggtaatcgtcatagagagtttgcatctctaaatcgtttggcacgagcttcaaatattgtttgagggccgctaacatttctgggacctgtgccatttcttggaagaataaaattaaatcgtgtagaaagtccgagttatctttcaagtcaggataagctaacagataattttcgcgcgcttggtcaacatcatccaccgccatctgtgattgcgccaatgaccaatataaatcagccgttggtttatgattttcaatcgcatcttgtaagaaagcaatgttttcggcatggcggccttgacggcgataaacttggctcaaggcactaatttcgcccatattatcaggatcaatcttgagggcctcgtttagcatctgttcagcaacctcgttattgcctaattgaagcgctagatcgctccccttttgatagaggacctcgttgtaggcatcgtacccaattccggtctgaacggtcgttaaggcgtcttctaattgattctgagcctcttgagctgctgccaagtaagtatatagtgacgtatattgtggatcagtcgtctgtaacttggttaagatttcaattgctttttgataatccttaatttgtaagtacaaaaagcccatctggaattgatcgtcttctgttagaaattctggcgtcaacccttcgtaaatctgcaaagcttcttcaaaagccccactgctggcataactagttgccaaccgcttttgaatattcacctgtcccagttcaacaacgtcttggtcgatgagcgtctcatagtaattggcggccttcacatattcacccatttcaaagtacaattcagctaatgcgaattgcatgacgggttcatctggatataggcgcaacgccgtcaataatttttgttcactaacttctggtaagcccattgtttgatagacatcagctgccgtcagcagactttcggcgtacgcattggattctggcgtaatatctgccaacaagttcaaggcgtcgtcgtattggccattgctgaccgcaatatctgctagtgttgttctgatttgatcttcttcaggaaattgggccaacaattgttggtaaattgtcgttgcttgttccaaaaaacccatcgcatataactcttcagctaagctgtagagcgtatcgggttcatcagcaactaaggcttgttggaagtaagtctgtgcttgttctaaattattatcttctaatgctgtaagcatttgttctgaattcgtcatttaaccaccctttttcgattgttccattttaacatattcggattaattgccaataaaaaaagactgggaaaaatcccagcctataaattgaattcttatttaacagaatcctttaatgctttacctggcttgaatgcaggtactttgcttgcaggaatcttaatttctgcaccagtttgtgggttacggcccttacgagctgcacgttcacgtacttcaaaagtaccaaagccgattagttgaactttgtcaccttttttcaaagtgtcttggattgaaccaaatactgcatcaactgcagcagttgcatccttcttagttaaaccagtctttgatgctacgccttcgatcaattgtgctttgtttgccatgtttttcacctcctgctcatcacagataatcagtaattaattaccgaaaccatttttgagtggtcaaaaatgacgaaacaatgatttgatcaccatttcattttttaatttatcacacaaacctagtgatagcaaggaatttcgctaaaaaacagcattctgagcaaattagttaatcatattagcggatttttgaaaaaacagcttattttcgttgacgagggatcaaatggattggtgtaccagtaaagtcaaaggttttccgtaattgattcttcaagaaacgttgatatgagaaatgaagcaagttaacatcgtttacgaagaccacaaatgtaggcggttgaaccgctacttgtgtcatgtaataaatgcgcaatcgtttcccattaatagctggagttggtgtcaccgttgttgcgtccatcaagacttcgtttaagagtgctgattggatgcgccggttttggttttcactcacttgttcaatcatcgctggcaagttttgcaagcgaacgccggtcttagccgatacaaagatgattggcgcatagtctaagtattggaattgatcgcgcacgtgattttcgaactctttcatcgtgtggttgtcttttttaagtgtatcccacttattaaccacgatgataatcccacgaccagcttcatgtgcgtagccagccactttcttatcttgttcacgaataccttcttcagcattcaaaacgactaatacgacgtctgaacggtcaatcgcacgtaatgcacgcattacggcgtatttttcagtattttcgtagaccttaccccgtttacggatcccggcagtatcaatcatggtaaattcttgattatcttcagccgtgaacttcgtatcgatggcatcccgcgtagtcccttcaatttgagagacaattacccggtcttcttttaacatcgcgttcacaagtgatgacttcccaacattgggacggccaatcaaactaaacttgatgctatcgtcttcttcttcgtcatcttcagctgggaacttagcaacggcggcatctaaaagatcacctaacccttgaccatgagcccctgaaacggcgatgggttcgccaaagccaagactatagaaatcaaaaatatcttggcgttgttctggattatccgccttattaaccccaagtaagatcggtttgtcagcgcggtataaaatttgtgcaactcgctcatccgcatcagtaaccccttctcgtgcactcactaagaagataatcacgtctgcttcatcaattgcaatttctgcttgttgtttaatctgttccataaatggtgcgtcactaatttcaatcccaccggtatcgattaggctaaattcatgccctaaccattcacttgtggtataaatgcgatcacgcgtaacccctggcgtatcttcaacaatcgagatccgctcaccggcaatgcgattaaaaatcgtcgatttaccgacattaggtcgaccaacaatggcgataactggttttgtcattgtattcattcccttcgttgttcagtgtaccctgtctgagccaaactgacaaggtcactccgacaaagtccgctgaacttccgcttcctctgcgtcgtactaatcaatcaccgacataaacgtagggtctgggacaaaacctagttttgtcccagaccctacctttttgcatataacttttaaaaaaattatttatcgtctaatgttttaccaagcatgtcgccgatactgaaacctgtttcttcttctggcatcacatagtcagaaggcgccacatctttgtgttctgaatccttagcaccagcaggtttttcttgcaatgctttgattgataaacctaaacgttgttgttcaggatcaactgataagaccttgacttgaaccgtttggccttcttctagcacatcgtttggtgtggcgatatgttgatgtgagatttgtgaaatatgcactaaaccttcaaccccagggaagacttcaacaaaggcgccaaatgttgttaaacgtttaacgaccccttctaaagtgctaccaactggtgctttatcagcgatatcatcccaaggaccaggttgcgtatctttaattgataatgagatccggcctttttcttggtctaagctcaagactttcacttgcactttttgaccaacttctaagacatcagaaggttggttaatgtgatcatatgaaatttcagaaacgtggactaagccgtcaacgccacctaaatcgatgaatgcgccaaagtttgtcaaacgagcaacttcaccttcaacaacatccccaggtaacattttttcaaaaactgcttgtaacttagcttgacgttcttgttccaataatgctttacgtgaaagaattaaacggttttcacttggttcaatttcaataatttgtaaggttaattcttggcctttaaagctgcttaaatcacgtacgaaacgatcagaaatcattgaagctggtacgaagccacggacaccagcatcgacgactaagccgcctttaaccacgtcgatgactttagctgtgattgtttcttgattagcaaatttttgttcaatttcagaccaaactttacgggcttctaagcgacgtttagataataagtagctcccgttttctttatcgttaccgattcttgaaatgaccactaaatctaattggtcgcctactttggcaacgtctgcgatgtcttcaataggttgacttgataattctttttgaggcacaaccccttcaacaccagttccttcgatgccgacaatcacttgtcgatcttcaattgctaaaacttcacctttaacaacgtccccaattttgacttcgtggacactgtctaaagcagctgccattgcatcgctgctttgggtgttattcaaattagcttcactcatagctaaaatcctccttaacgactatctatacagttactattttagttgatatctattcggattaccagttattttacctcgttcaaagataaaattacatatttttctttacaattgctaatattgtgtcgaccacctcatcgattgttaactgagttgtatcgatttcaatggcgtcgtcagctttttttaagggtgaaatggcccgtgtactatctttttgatcacgtaattcaatctctgcttgtagcgttgctaaaggcgtcataatccccttagctgtattttcagcataacggcgtttagctcgttcttgggcacttgccaccataaaaattttaaccttcgcagcaggtaacaccgttgttccaatatcgcgtccatccatgacgacttgaccttgatctgcaatctgacgttgccgtgcaaccatctcagtgcgcacaccagctaaagctgatacttgtgagacattattcgtaatttcaggggttcgaatggctaatgtaatatcttcaccattcaagaagactttttgccctgcttggtcaggtttaaattggatatctgcttcttttaaagctgctaaaattcccgcttcatccccgaagtctaaccctaatttctgtgctaacacggttgatgcgcgatacatagcacccgtatcaacgtatacgaaccctaatttagtagccacaattttggcgaccgtacttttaccagatgatgctggtccatcaattgcaatttgcatgttctgcctcctgaaaaaatcattaaaaaaggctgggagtttccccaggccttttggtagtactgattatttaacttttagagctgtgcctggtgccacttgtgaattggctgttaacccagggtttaatgcaagtagttgatcgagtgttaaaccgttattaaccgctgcgcggtataaaccttcgccggctttcaacgtataagaaccacccgttgtttcgcttgaactgctactttcagttgttgtttcttcgctactactattttgagcgtctgcttgagcttggctttgactattagccttttcagcttcttctgcagcttgtttgctactttcaactgcttggctttcactagccgctttttcactttcagcctgtttagctttactttcgctggccgctttggtagcactttcgctagcagacttcgcttttttagcttctttcttagaagcactatcactatcagaagtattaacgacaatcttactagactcgactgggcggttagcccggctagaatgaatcgtataggcaataatcggaaatgcaatcattaaaacaagcaatacacctagaataatggcaaaatatgtatttcctttttccttactcttggaagcaacacgcgataaattcccgcgatcatcacgatcatcatcaaactggctttcccagggtttgtcttccgtctgattatctaattttttcttatcatctttgagcattgacggccctccctattggtattctttgatattgtaccatagacccttttaaaatacccagaaaatctctaaaacaattgcttcaaaataccgtcccaatggtctaacccgtctattttaggggatttatcatcagttaacgtttttaaattaaatttttctaaaaagaccgttgaatcctgttgaccacaacattgatcagcatgggcaacctgttggggttgctcgtcaaaatagttcacaataaattgccgccgacagccttgtaagtttaaataatcaaccattgtttgaagcgcaaaacgcttttctttttgccgattctgtaacagttcactaacggcctgttcatccatcccaatttgctgataccgccgtaataattcaaactcgttgccttggctttgtttaaataatgtcggttcttgatagaaacgccgaatcaatccagcttcaggaatcccaaatgacactaacgactgttgcagatacgtatcttgcggtgttgctaacaacattgcataggctggttggccatcgcgccctgcacgaccgacttcttgtagataactttcgatattttgcggtaaatgatagtgaatcacatagcgaatattggctttattaatccccattccaaatgcattcgttgcgcagattacgtccaactgcccttgcataaactgttgttgaataatgaagcgctcctgtggcgaaagcgctgcgtgataataggcaactcgcatcgctgtcttttgttgcaaaaaagccgcaatctcgacagtcttttgacgacttgaaaaataaataatcccgggcccctgactctcagttaccaattgttgcaaaaaggcgttcttactcgcttcatccgcttgttgactcacccctaagtaaatattaggacgatcaaccgacgtaataatcctattggccgactgcaaatctagcttggctaaaatatcatgccgaacctgtgcatcagctgttgcagttagtgcgagcgttgcccccggatttaattggtgcttgatttgcgcaagcactaaataatccggccgaaaatcaatcccccattgtgaaatacagtgggcttcatcgatgaccaataaatcaatctggcattgttgtagtgcttgaatgaccgccggctggcttatcgtttcaggcgccataaacacgaaacgatactgtggcaattgtcgcaataacgcatgcttttgccgcggttccaaatttgaattaatcgcgactgcctttttttcaccttggtaattcaactgtgcgacctgatcttgcatcaatgcaattaaaggtgaaataatgacagtggtatggcccaaaagataggctggtaattgataacataatgattttcccgtcccggtcggcaaaaccgccaaagtcgcttggcccgccaaaacagattgaatcacttctaattgtcctggcttaaatgtctcatagccaaaccgctcttttagcgttttataaatcagttcatccgtgctcattgggcgttcacctgcctttgaatttgataaagccgatactcaaagaaatctagaccggggagtgcggtttgtgcttcattatagctgagcgatggctgttcagtcatcaatctagctagtttttgtgtagttgcatcctttaagaattgttcaaacggaaaccgtgggagtaacatcgcggtttctaaaaggtgttctttaatcgttccgatcttaacccggcgctggcggctgatttgtttaacactcgccccttgttggatcaattgccaggtctgtaacgtactctgactcaattgcgtttcagcctgatccactaattcattcaatagcggataagtcgtttggtgcgccaataaaagccctaaaatttgagcaaaggcgtcgatggtccgcacacgaactgtcaaggatgggctatctaaggcttgcgccagttgttggtggcttttgcccaagacttgatgtccgatcagttgatttgccacaagatcggcttgttgcggatctaactggtcaagtaattgcgccaattctagctggaattgactgctaaaattgatggttgccttatgccgcttaaaccaactgaccaccaacacgcggtccttcatactcgtttccaatggatagtactgcgtattttgatgatgatattccgacacaatttgaacggccaacataaaacgagcagtgaattggggtaagtgacccatctgtgggccttcatagtgcgtcggccaaactaattgcggctgccattcagcttgtttttgttgcccggtagcagtcaaccaaacataccgctcatcgatttcaatccaaccattttgctgaagtcgttttaattctgcttgaaattgtgcctgttctagattaggataaatttggagccattttaataatccatatgctaaaccggcatacagatttgaagtagttcgtttaccaattaaggtatagtagattgcttgataccgccttttctcaggcgccaacaagcatagtagatacgccattaacatcatcaattaagtcctttattgagaaagtgtgaatttaatgctctatagtcaagtcatcccggaacgctgtatcgcctgcggtctctgccagctaaaggcgcccgacttattcgattacgatcaagaagggatcgccttttttaaacccgatcataatcagggaacgacgccaattgaagatcctaaagaacgaattgcgtttaaaaccgcctacaccgcctgtccaactggtgcgattgtacgccaatcaacgccatttttatcgtagcatatttacgtcctataaaaaaggttgtgcccgcttggacacaaccttttttgctgccatttatttggcaattggtttttgcatatgttgttttagccatggtaaaatccgtaaatataaaacggcaaacaccaccgttacgagtgcacctttaattaaattaaacggtactaatccaaatagaatgtatttggtagtcgacattcctaagttcaaacccatcaatttaatatagagcggtaaaatgaaaagccagttagcaaatgacatgaagatcgtcatgctgacagcccccgcaacaccagcaattgcttgacctactaaaacgttcgattgacgattgaataaataatagaatggtaacaagtagcagattgacgccaagacaccggcaaagtcgccgaccaaactcggtaagctagcaccggtcataatgaaatgaagcgtcgagcgaatcaatgcgacccccattcctccaattggtccgtaaacgaacgtccctaacaggacaatcacgtcactaaaatcaatttttaaaaacggaaatgcgagaataattggaaattcgaaaaacatgacgacaaatgaaattgcccctagcattgcgaccccaatcatcgtacgaacttttgaaacttgcattactaacaccctccagatgaggttgccttcgtcagcggacttagccaagtctgattgcatcaaaaaggtctgttaatcagggagattaacagaccttacttgcatacattcatacccaaataagccctatcttcttccatctagactttcactatcggtactggaatcacaccagttcagccaccacaagaatcaacattgtagcaggtcgcggacttttaccgccggtcgggaattacaccctgcccctgaagacgaaccattaatattttgttcgaaataagcatagcaaatcaacgtgccaaaagcaactaattaatcatgccgtgataattttggtcgattcttatgctgtggtttttcatttagttcagcaatttttttgaattctgcgacttcgattggtttcaaagcacggtattcgccagaaactaacccatctaacgttaagaaaccatatgtttcccgtttcaactttgttacgggtaggccaaccgcagctagcatgttcttaacctgatgattcatcccttcgtgaatggtgatgcttacaatggcagtgttcttacgccgatcagttgaaattactttgaccttggctggtgctgttttgcgtttttctaagacaattcctttacgcaattggcgcaacatatctgcagttggtaatcctgaaaccttcgcaatataagtcttgtcgactttatattttggatgcatcatcatgttggcaaaatcaccatcattcgttagtagtaataagccagatgtatcgtaatctaatcggccgattggataaacccgttcaacgatatcgccaaggtattcagtgacgacccggcgtttcttatcatctgtcactgctgaaatcacttggcgtggtttatacaagacataatagaccttgcgttcacgcgttaacggcacaccgtcaacttcaatatgatcgcttgtgctatccaccttgatacccatttccttcaccactttaccatttaaggtgacgtgaccagttgcaattaaggtttctgctttccgtcttgaagctaccccagcatttgcaatcactttttgtaatcgttccatttattgttctcctttggacgtctcttccgacgtcgtatctgtttcatttaacgtttgttcaaattgacggtaatacaagtctgctgtaccaccttcactaccatcgacatcagcgtcaagtgccaattgttcaagtggtggtaattcatcgagcgattcaagaccaaagtaatctaagaaataggtgctcgttccatataaaattggccgaccaggcgcatccttacgccctttttcgctaattaattggcgggctaacaaggtttggatggccccactactttgaacacctcggacctcatcgacttcaatccgcgtgattggttggcgatagacaataattgccaatacctcaagagcggcctgactaatactagttgacaccggtccatcaaaataggtcttcaacaacgtcgcgtattcttttttggtgactaatttatagatatcttcggcttgaatcaggttcaaacccgattcagtgttgccgcggtaacgatttgccaatttttctaataactggcggactgccggttcatcgagatgaataagttgcgcaatttgcgcaagcgcaattccttcgtcccccgcgacatataataaactctcaatttcagcgagatgattcaactgaaatgccctccttcaaccgaaccatgattggtgcatcatagtcggcttgttcgcaaataatttttcgatccttcatcaattctagtacggctaaaaatgttgtgacgatttcatctcgatctgttttaacaacgaccaacgcttcaaaagcaactggttgagcggctaaatgacgcacaatccaactcattttatccgtaatcgaaatttcgtcattttggaccgttttgaagaccggttgtttagcttgggcttcgaccaacattttagaaactgcggccgctaaatcgcgtggcttaatcacgccgcgcgccagtgggaccactttttcagctggattactactagctggcttagcaaagagctgttggcgctccaattcgcgctcttgcaaaaccgttgcgaccttttggaaggcttggtacgccaatagttggtccactaattcctgccgtggatcgacgtattcttctgtttcttcttcaattaattcaggtgccttaggtaagagcaacttactcttaatcttcatcaacgtcgccgccattactaaataatcacctgcaacatctagtttcaatacttgcatttggtgcaagtaatcaagatattgcgcggtgatttcagcaatgggaatatcataaatatcaatcttagtttgcttaattaaatgtaataataaatcgagtggtccttcaaaatcagtcaagaccaacgttaattgttcagtcattggtcaatctagtccatttctgtattctgatgttgttcccatttagcaatcaatggcgcagtctctaacgaacccatcacgcgactttcaggataaagcgccgctaattcatccaacatggtgaaatagttctcgtcgctacgttccgaagggttcagtgaaatatggcgcactaaaatatagtccgcacccagttcaatccccacaacaccggcaaaatcgccggcttcattgcgccataaatataaattgcgttgctcatccgacgtatagagcgccaattcagcttgtacatgactgacttcttttaaatccggtacgaaggataaaaagcccatcgcaatcttttcataatcatttttatacttgaataacatgttgacctccattgatcaaacaaagttctaatagcattaactctaccatagtttataaagcgcgacaaatctaatttaatcgcgtggatgactccgttggtaaacttctgtcaaatgtttcttactaatatgcgtgtaaatttgagtcgttgaaatatctgaatgccccaataattcttgtacaattcgcagatctgcgccattttcaagtagcacagtggcaaacgaatgccgcaatgtatgtggggtcacgtctttttcaatcccagccgttttaacatgtgccttcaggttcttccaaatcccttggcgcgtcaacccgttaccatggaaattaacaaacaggtacgggttagcacgccccttcgttaattgattccggctacgatcgaggtattgattaatccaatcaaccgctacatcaccaatcggtataatccgttccttattccctttgccgagggtctgaattaagcccagtgataaatgcaaatcagccatctttagatgaatcagctcgctaactcgtaaccccgtcgcatataaaacctctagaatcgctcgatctcgtaatccaagtgcggtgctcgtatctggtgccgccaatagtcgctcaatctccgccgtcgataaaacagccggtagatgacggccttgtttgggcgaatcgatttggagcatcggattttgtttaatctgcttttcacgcgctaaatactgatagaatttacgtaacgttgaaatgctccgtgtaatactactttgtgccttatgcacatcagtttgttcttgcaagtagttcaaaattaaaaagcggtcttcagtaaaattggcaacctgctgacgttgtaaaaacgccgcaaactgttgtaaatcctgccgataactctggcgcgtattctccgaaagaccgcgttcaacttttaaataatgtaaataatcttgaattaaatcatccatgtgcttcctcttttacaactgcgtcacgtcaatttggcgactaggatccagttgattggctggtaacccattttgttggttaatctgttggcaacgtgcacaaatcccgtgaaatgttaaacgatgatctaacaccgtaaatgtgtaatcatcatatacctgttgttccacggcaggcaataaatccgtatgaatttcttcgattgccccacattgcagacacaacaggtgatggtggaaatgatggtcgtgatcagtctcacacaagtcatagtgggtcatcccatcttcaatgaaccgaactttattcaacacatgcagttccgtcaacatctcaagggtgcgatacacagtggccaacccaatttcagggaccacctctttagttgccataaaaatctgttcggcactcagatgcgcttgggcatggtccaaaatgaccgccaccgtcgcagagcgttgtgctgttaacttgtagccggccgcttgtagctgctcggatattcggtctaattgctcagctttatccatttagcaacttccttttcaatcattcaaaaaagcttagtcttgcttctcgtcatctgtaattggggcaatatcagcttgacctttttcagttaaactcgttaggccctctgcttgagtaattaagccatttttcattaaccggcctaatgcccgcttaaaactgcctttactaatcccaaagtaactcttaatcgcttctggatcgctccggtcagtgtatggcattgcgtaatcaggttgccgttttaagacagccataatcatttcagcatcgtcgccaatttcttcatatgcccgtggtttcaaactgacatttaaactaccttcaggtcgcacaccaatgacgcgccccttaacctgttgacccaaacgtggttctgcttcacgttcagaaggatgaatgaacccaatgtaaaagtcatccgttaaaataaacgtcccggctaacttcaaacggtagaccgtccccatcacgtcttggttcttcatttctggtttagcaccttttgaaattgatctgaagatgctttcgtcagctagttggccccacatccgccctttttgatcgacttcaatcgcaatcattaaacgatcacctggtttaggccataatttcgtaatggttggtaaaatatccagtgatacgacaatatccttatctggcaagccaatattgacgaaaacgcctaaatcacgccgcgtttcaaccacttcaccaaaggcataatggcccacgcgtgatttaggaataaacgttgataagatcaattcccgacttgagttttcataagcaaaaccagtcaccgtttcaccgattgtcaattcttgttctaaagtttctttttttaattcaaatgtcacgccgtctttttggacaaagaaggctgtttcattttcatctgttactaaggcagtaatgacttgcccgattaattcattcatagttaacctcttttattcttattaattaatgaattggtactaaattaaagaccgttaaaatggtataagtaatccccgctgcaattacggggccagccgcaatcccttttagaaaaacgacacccatgatggtcccaaaaaccaaggccactgtcatctcaggactagcggacaatagccccacacccttcgctgatagtacagcaactaacacgccacaaccaactgcaataaaacccgccggcgttttaaaggcattgattaagtctttgacaccaatttgccccgttgcaatcgggactaggatagcaaccgaaatcactgtcactccccaattaatgcctttggcttggatcacaggcagcaccttatttgaaatcgggaatacctttaatattaaaacaaccgcggtcgcaatgattaaagattgatttttcgctaacaatgcaacgattaaaatcgctactaaaaataaccaactttccatgtaaacctccaataaagtctccctactattgtaccgataaatgaacgacttgtcagtattttcagaaaagtaattcaagattcgcgtttttaaaacaaaaaaagccccctcttttcagagggggcttcatttcatcattcaggaatgattaaagagcgtttgttgcaccgcggtaaacaatcccacgacgtgaatcaacagtcacaacttcgccatctttgatagcttctgttgcgtctttagcaccaacaacaactggaatacccatagcgataccaacaacagcagcgtgtgatgttaaaccaccgttttcaacaacgatagcacttgatttttcgattgctggtaagtaatctttgtcagttgatttaacaactaagataccaccatcaattgctttttcagcagcttctttagcgtttgaagcgacaacagccttgccaacgattgtttcatcgccaacaccttggccttgtgttaattttgaaccaattaattggatcttcataacgtttgttgtgccacgttcgccaacaggaacaccagcagtgatcaagattaggtcgccttctttagcaaaaccatgttcttgagctgtttgtgtagctaagttgaacatatcatctgtattagcaggtttcttagcgataactgggtatacaccatagttaactgttaaaccacgacgtgtacgttcgtcgaatgtaacggctaagatgtcagcttgtggacggtatttagaaatcatacgtgctgttgagcctgattctgtagcagcaacgattgtcttgattcctaagttacgtgcggtgtgagcaacagcttggccaattgattctgtcaagttagtcttgctgtatgctttcaatgcgtatgcatcgcggtctgttaatgatttttctgttctttcatcaatgcgagccattgttgcaacagcttctactgggtagtcaccgttagcactttcacctgaaagcattgttgcgtcagtaccatcaataacagcgttagcaacgtcgttaacttcagcacgtgtaggacgtgggttttcttgcattgagtccaacatttgtgtagctgtgataactggtttgccaatagcgttacatttcttgatcaagttcttttgtacaaaaggaacattttcaaatggaatttcaacacccatgtcaccacgagcaatcattaaaccatctgaaactttcatgatatcgtcaatgttgtcgataccttcttgtgattcaatcttagggaagatttgaacatgttccatgtgtttttcttctaataattcacggatatctaaaacatcttgaggtttacgaacaaaacttgcagcgataaagttgatttcgtgatctaaaccaaaacgaatgtcgctagcatctttttctgtgataccaggtaagttgattgaaacaccaggtgcgttaacacctttacgtgagccgaccataccgtcgttttgaacttcagtaacaagttctttgtttgcttcgtctttttcaataattttaagatccactaaaccatcatcgattaaaacgtgtccgccgacatgtgtgtcgtcgtatagacctgggtaagtaacagcgattttttcaggtgttccttcaagtgtatcgtccattgaaatacgtaccacttcaccagtgtgtaattcaaatttcttaccttgttgaacagttgtccggatttcagcaccctttgtatctaacatgataccaactgttttaccagttaatttttcagcttcgtgaaccatgttcatccggcttaaatgttcttcatgatcaccatgagagaagttaaagcggaatacattagcacctgcttcgattaattttgcgatagtttcaacattgttacttgcgggtccaagtgtacttacgattttggttttcttcataagtggaatctctccttttatgtctattttttaaaagacttttcagtcgttttaacaattttatatatggaacgatgaatctagtaagctaaatcttcgtttaaatcataaagatctaacattgcgtgatgcttgtgattgaacaagtctaacatatcatgtgcgataatttcgttcttttcaatcccaagtgcaacgccacctttgccttcaagcaataattcaactgcttttgagcccaaacgacttgctaacacacggtcactagctgttggtgccccaccacgaacaacgtgtcctaaaacagttgaacgtaagtggaaatcgccgtattcagaaagtttttctgagaattcatcagcgtgcatcacaccttcagccaatacaatgacagcgtgtttttgaccatgttcacgtgaagtacgtagcttatcagcaacggccttaacgtcgaaatcatgttcagggataataatgtcttgtgcgccaccggcaacaccagcccaaagcgcgatatcaccagcgccacgacccattacttccacaacgaaagttctttcgtgactagcagctgtatcacggatccggtcaattgattcgagcactgtgttcacagctgtatcgaaaccaattgtttgatctgtaaatggaatatcgttatcaattgttcctggaagaccaattgcgttataaccatgttcagttaaacgaagtgcaccgtgataagaaccatcaccaccgatgacaactaaagcttcgataccaaacttcttgagttgttcaatacctttcaattgtccttcgacttgtgcaaattctggataacgtgctgagtacaagaatgtcccaccacgttgaatcttgtcaccaaccgtaattgggtccatcttgaagatatctccggcaactaaaccagcgtaaccataattgataccatagacttcaaggccttcatgcattgcttttcttgcaacggcacggatggcagcgttcataccaggtgcatccccaccacttgtcaaaatacctatgcgtttcatcttttcaccccaggcaaatattttacttaaaaaaccaattggtctttcaaagtcactaatatattatcacttttcagaaaataagtcttgtcttttgcgaagattttcgcaaagatagaccaatttctttattggtcaaacccttttaaaatcacatttcccgtccctaaaaggtttgtaagcgcggtcgttagtttttcgttgctcacaacccaatagcgctcgttcaatagaattgactgtttatcggccgcattgtacaagataactggcgttgttccttgattttgttgtaacaattgatacatttgttgttgcgcttgactcgtcaacgccgtttgaacccgtaaataaagggtcgctttgggtagcgtcttttgtgcatcttgtgccaattgaatctgattagcaaccacttgtaaatcgcgacgttgttcaactttcccggtgataaaaacaacttgtcctgtttgtagccatttactgacccgttgataaacgccagtaaagagcgtcacactaatttcaccggttgcatcttgccccgttacaaacgccatttgatcgccttttttcgttcgaatcaccttaattcggcgaatgaatagcaccaaatggaccgtctgctcgggtgccaaatcactgatatcaggcacatggtagtgttggcgtacacgatcatatttttcgaccggatgccccgaaacatagaccccaagatattcagcttctttatccaatcgttcagtcaaggttaaattcggtacggcacgttctttcggtgctaaaacagcaaataaatcgacgttattccctgacaacttcacactatcaagcaggtcggctaagttggtcaacagcgcattccgattcggattaaactgatcgaaggcgccactataaatcaaggcttctaatgcctcttgcttgagaaacttaggatccatccgctgtaagaaggccagtaacgatttaaacggtccgttcgttgtccgttcttgaataatcgccgccacaaaatcgcgccgaacttttttaatgctgaacaaaccaaagataatccctgagtcggctaatctgaaataactttgactgcggttaatatcaggtggcagcactttaatttgacgtttcttagcttctgctaagtaagttttcgtttttgtcggattgttcaaaacggcatttaataaagctgcaaaaaaggctgctggctgatgaacctttaaataagccaaccagaaagcaattttactataagcaacagcatgtgaccggttaaatccataattggcaaaccgctcaatatagtcgtagactgtcgtagcagcagtttctgtgtgcccgcgttcgagtgcgccttgaataaattgcgtccggctagcatcaatcaccgccttcttctttttactcattgctcgccgcaataagtcggcttcgcctaagctaaagccccccatcttggacgcagcctgcataacttgttcttgatacactaagatcccatacgttggctctaaaatatcggctaacgacgcgtccggataagtgacaggttcttgcccgttcttacgagcgataaatacgtcgatgttttccatcggacctggtcgatacaacgcatttgtcgccacgacgtcttcaaaagaactcggtgccaaccgccgtaaaacattcttaatgccaagtgattcaaattggaaaataccattagtatcaccatgttggaataatgcaagtgttttaggatcatccaacggaattgagtgtgggtcaaacggctgtcccgtttgctgtccaacaagctttacaatattagcaagaatccctaaattacgtaatcctaaaaagtcaatcttcagtaggcccagttcttccacgttgcccattggcaattgtgtaagttcaatctcttcaccgccactttgtaatgcaaccgtatcagttaacggtgcttggcttaacacaatcccagccgcatgcgttgagtagtgtcgtggcagtccttcaagtttctgtgctgtctcgaatagtaatcgattttgagcggaatcggccaccaaatttttcaatggttgtgattgttgataagcttcttttaacgtgattttcagcatgtccggaattaccttagcccaatcattcatttcaaactgacttaagccaaacacacgccccacatcacgtaacgccattttagctgccagtgtgccaaatgtaataatttgcgccatatgattccgaccgtatttgtgatagacataggccagcacttcatcccgacgattatctgggatatccaaatcaatatctggcatattcgcccgattggggttcaaaaaacgttcaaacaacaattgatattgaatcggatcgacatcagtaatcattaaagcataggccaccaacgaccctgccgcagagcctcgccctgggcccgtcataatatgttgttcatgggcatgccgcatgacatcggcaacgattaagaaataatcggcaaagcccatctcgttgatcactcgcaattcatactgcaagcgttcttgatattcttgcggaatcgcttgatcggcaaaccgaacttgtaagccttgctgacttaactgttctagatatgccgttgccgactcttgatgcggtgtttcaaagcgtggtaattgggcccgcttaaaggtcaactcaacttgacagagttgggcaatcttatccgtattgtgcacggcctcgaccaactgcaatgcttcaaactcggccgtaatctgatcagcagcttgtaaataatagccgcctggcgttgtctgatcaccactatggagattaacttgcgtaccagctttaatatgttgtaagacttgcactgaaaaagcatcatctggttctagataacgaacatcacctaacgcaaccagcggaactccggtcgtctgactcaatgcaattaacccgctaagttggggggctgctgctcgcttggcactgattcctaaatacaagctccccggatcaactgccgcctggagttgcgtcaaatatgccgttgtttgctcctccgcttgcaaaagtaggcggactaattcgccatcttgagccggtgtgatcactactaaatggctgaaccactgtgtaatatcagcaaatgaaaccagatcagtttgagtcatcactttagaagaaagcttcaaaagattctgatagccaactaaatctttcgccaatacaattagcggaaaccgttcatcggtttgaagtaatccgccaatttcaagcgttaaacccaagattggatgtaagtcagctgccttggccgccttataaaaatcgactagcccataaatcacgttcttatccgtcagcgcaatactctgatagccgcgcgccttagcactttcaatcagtgcatcaattttagtggtactttccaagagcgtataggtactcttaacctgtagttgaacgaatggcaagcaacgccccttctttcttcgttaattcgattactcttagtataacaaattatttcaaatgattctctttggaaaacgtgttacaatatcatagaattgaatcaaagaaagaaggccaactatgaaatacgttatgaatctactttggacattgatttttgggtttgtcattggatttatcggttctaaactaacgaaaaccggctttaacattcaaacaactgttatcgtctcagttatttttgggcttttgctcaacttcttacctcttgtcttaccaaaagatccagctaaataaagcacaaaaaagggccgcaactttatgttgcggccctttttacgtttattttgtaatgtaaatatacaaattacttgttgaaaaaccggtattgaacttcacaccatttgattcaatcgtcttcatcgtggtttgactaccttttttgtttttcttcgtataatcgctaaattcggacatcacttttttggaatcagcgcccgttgcttgcgcaatcaatgcaaaactggtcccaaaatctttcaatgccgctttatctttgagcgctttaacgggtgtaatgagcgtcatccccattacatcttgactatcaacagaaccgcgaatggtgacatgctttgttgcgacccattcagtcaccccatttttaggtgtggttggtagcaattgatccttttgtgtctgttgcacctgttgcattgctgcttgtacttcctgttgccgctgcttaagtgtcatcagatcagcaggtgcaagttggcctgctttggcagctgctgcttgtttttgcaattcctgcgctttggtttgatctgccttagataacgccatcccaattaaagcctggttgtattgcgcggcaatcttggcatattggccaactgatgtgcccgctgcaatcgttaccttcttttgaacggttttaccgtttgctttagcttgtaccgttactgtttgtttgttagtcgttgttggtacttgaatcacataagttccgtctttgaccgttgctttttggaaatgattatgattaatccggtattgtaaatcagcttttttggttgttgaaccttttacgactgccaccattccattttggcgataatttgttttagtcgttgttaatttggttgtcccacaaccagccaatagaccgattagccctaagctggtcactaaaccaacaattgtttttttcatattcgtcaccttttcattgaaatttaactcattgaaatcttagcttaacccttttagaatcacaattcaagcgaaaacgacgaagtgtcacattttttaagaccaatcaaaaagagcgaccacttaacggccgctcttttaaaaacttattttaaatttgttttcttttcataacggttaaacatatataatgcaacaattgtgaagaagatagggccagcaactgaccagattgtttgacttaaattaccatcaattgctggttgaataatcgtaaagacgttcgcaaaaccaactgtgaacatgaccatgcagacacagaatttatagaaggtcttccctttataaattgtaaatggtttttcgatactttcatcctttttaaagccaaagtatgagtatgccacaaacatgtatggcaatgtcattgaaacgtttgtcatcgctgttaagatatcgaagaacttagcagcactcttaccaccaaaagcaacgaaggcaataatcacaattacaattgcagcttggaccttcattgcattgaccggcatattattactatttttcttagtaaatgacttaggccaaaaggcagcaggtgtcccttcgataattgtttttaatggtgagaaaataattgtaaagaaagcaccactaagtgctaagaacattgaaagccccatgtaacgactgagccaaatcccaacttgaatagcagcatgttcacttaagtgcattgctaaccctaattggtaacccatgttgttcatggcaatataagcaacgttccccaaagtaacggttgcgtttgaaccggttgctttggcgaagccaccaccattggtaaagacgaagttccagttagtgaaagtccccatcataaaaatcccaacagcatagccgacaacaatcacgacagcagaaatagctaacccttttggaaagttaaccttagcgttttcagtttcatctactaatccaccaacaacttcaagaccaccataagcgaagatcgcaaatacaacgaaactgaagacttgaatcatcgatgtatagctttgatttggtgattggaagaatgcatgggttgtaacaggttgtgccattacccctttatttaaaacaaggattaacaaaccacccaagaataaaatcacgttgattaacgtaatggctgaaccaccaatactggtgattttcttgattttatcaaggccttttgatgtgacaaaggtaatgacaatgatccaaataatagctaaaattcctaatgtttgcacaccatttgtcaaaccaaagattgaccattcttgtgttttatcaaccccgaaaaaggcgtttgataatggaatccaaatcccgttcccgacgttaaccatccagataatgtatgaagcaaaccacataaatgtgccgacaaaggcaaatttagcgttaacggatttctccatccaagagtaaatccccccctttgcttcaccaaaggccgctcccatttctccgagcataaatgcataaggaataaagaaggtaacagctgctaaaacataccaaaaaattgatgcatatcccatcaagtagaacgcacgtgggatattcgtaaatccaaagactgacgtaaagaccattagaataagcgcaccaagcgttaacttattcgtcttcttcttttctgccacctaaaacacctctttcatttttttcagacttaaccacaatgattaatcctctgaataaaaattagttaactaacatttgttaataaactaattagttacctttattttacggcgaaaatagaaagaggtaaacgaattcattatttttgtaattgaattatttgtgaatcttaattcaattctcattttctagtcaattacttattttttgctggcgttttttcttcaactggttctttcttcaaagtaatcccaattgcaatcttatataccacactctgacatgctaatttcagcaatgtttgttggggttcagtgaccaatgtacctgctggatttttgccttggtcataggggctgtaatcctcatctaactgatgaatcgctgctaaaaacgttaagataaagtaatcataaagttgcttttcatttcggttaggtgtttccgctgtcatcaattgtttgatttcttcaatcgaaaaactcgttttcaatagtgcaataattaaaacttgagcaatttgcgattttgtataccgttttttaatcggtgctgccacaatttcttttttgacgtaattattaatcattgaagcggtgatttcatctaaatttaacgcgtttaggtattgattgatgtaactaaccacttgatccatatatagttccaaatcgggcaggtctgtccaacgtggtaagcgtacaatttgtaaacgatcgagcttttgtttcaagtgttcatttttcataattatcaatctccttttattcaatactaattataccaccatctagtatttaaaactaggaaactgcataaaaaaagagtttcttattcagaaactctcgatgacgattagtcgttagcttttggtgtaacaacttgttcgcctttatagaaaccttttggtgatacacggtgacttacacggtattcgccattagttgcatcgaattgtacgtttggtgtgttcaatttgatatgtccacgacgcatacgtttcttcgtctttgatgttcttcttgctggaactgccattattttcagactcctttatatcttagattcattaatgatataccgaactcggggaatttggcaaggattatctcaatcccattcaaattgattttaaatcatcacgtgtcccgctacttttgtccgcgacttctataatactatgtttatccgctaagagcaagtcaattacagaaaaacaattgattaacgactcttaatgacaccactttcaaagtggaatcgtccttaatcgtcactaacattctgtacatcatccccaataagtgtaccatacaaacatcaatctgacagtaataatccctgattgatgtccaaaaaaagcgccgcaaattaaatttgcagcgctttttcaatcgttagcgattttcaaaaactaactggttatcttttaagttaatttcaaccgtggttcctggtaacatatgcccggcaataatttctttagccaatggggtttcgatatggttcgtaataaaacgccgtaatggccgcgccccaaatgcaggatcgtaaccttcttctgccacccattgtttagcagcatctgaaatcgtcaatgtcaattcttgatctgacaaacggtctgatagatcatgaagcattttgaccacaatcgcttgaatatcgttcaagctcaatggtgtaaacataattgtatcatcaattcgattcaagaattctggcttgaatttcgtctgaattaagtcttgaacactttccttagccgtttgtgaaacttgaccttcttcatctacaccgtccagtaagatttcagaacccaagttagaagtcataatgatgattgtattcttaaagtcaaccgtccgtccttgtgagtctgtcaaacgaccgtcatccaacacttgtaataaaatgttaaagacatctggatgggctttttcaatttcatccaataacacaattgtgtatggattccgccgaaccgcttcagttaattggccaccttcttcatagccaacatagcccggtgcggcaccgaccaatcgtgatacagaatatttttccatatattcactcatatcaatgcggaccatatgccgttcagaatcaaataaatcctcagctaaagcttttgctaattcggtcttcccaacccctgttggtcctaagaagaggaatgagccaagcggacggtctggattttgtaagccagcccgtgaacgtaatacagcatctgtcacagcattgacagcttgatcttgaccaattacccgttcatgcagaacatcggcaagacgcagtaatttttgtcgatcaccggcaactaatttggcgactggaatcccagtttgggaactaaccaccgttgcaatttcattttcagtaacggattcctgaaccatccagtcctctggcttttcagccttttcaaggtcggcaaggtcttcttctaattgtggaattgtgccgtgttgcaacttagcagccgtttctaaatcataatttccctgtgcttcttctaattgccgtttagcagcatcaatttccgcttttttatcattaatgcggttcaaatcttctttttcagtttcccaccgcatctttaaattattcgttgtttcgcgtaaatcagctaattgtttttgcgtctcagccaatcgtttttgcgaagcggcgtcggtttctttctttaacgcttcttcttcaatttcaagttgcattaattgccgcgttgcttgatccaattccgttggttgtgaattcatttcgacgttaatgttggcactggcttcatctactaagtcgattgccttatccggtaagaatcgatccgtaatgtagcgatttgacaacgtcgcagctgcgactaaggcattatcgtgaatccggacaccgtggaaaatttcaaaccgttccttcaaaccacgtaaaatactgatggtatcttcaacggatggttcttgaactagcactttttggaaacgccgttcaagcgccttatctttttcgatattttgccggtattcatccaacgttgtcgcaccaatcatgtgtaattcaccacgcgctaacattggtttcaagaggttcccagcatccatgctaccttcagtcttaccagcaccaacaatcgtgtgaatttcatcaatgaagaccagaatccgaccttcactcttcttaacttcctttaacacagctttaagtcgttcttcaaattcaccccggtatttggccccggcgattaaagtccccatatccagtgaaataattgtcttatcttttaaattatcgggcacatctttacggacgattcgttgcgctaatccttcaacaatcgccgttttcccgacaccaggttccccaattaaaacggggttattcttggttttccgtgacaaaatccgaataacatctcgaatttcttcgtcccggccaataactggatccattttgccagaacggaccgctttgattaaatccgttccgtatttttcaagcgcttggtaattatcttcttggtttttagatgtcacacgctcgcctcctcgtaaatcagtaatgactttctttaatttttgttcagtgacattttgtttctgtaaatattgaacgagtgcctggtatttcaaacccattaagcccaagatgaccgtctcagttgataaaaattcatcttggaattctgttttgtatttttcagcagcagttaatacttggtacaagttttgtgagatgttttgaccgtaattcgtttgaccttcaaccgttggaattgcgtcaatttcacgatcaatctccgcctcaagagcatcgatatctgcaccggcttcttggtaaatttgccgtcctagttgttgtggttggactaaatatttaaagaggtgtggaatatcaatttcagtttgatgacgcgtcatcgcgattttctgcgcttctgcaagtgcatcttggacagcttgtgtcatttgttctggattcatagacgtcattcctttttcagttattttttaaattaagtgtcagattattctgactaattctataatagtcaaaataggtcaaactttcaagtaattcgcttataaatcagacttaagacggagagctggtaggcgagttcttcctgaaaagtaacacaaaaaaagaggctaagacaaaatctgtctctgaagtgaacccccgatattggaccaaaatccaatatcgggggtttttatattgaccaaatattctaaaacattaaaaataaaagttgttcaggattatctaacgtcacccttaggttataaattaatagcgagaaaatatggtattaagagtaactcactagttgtctcgtgggttcaacgttataaggcctttggcccaaaaggactggatgtcctatcacccaaaaaaatatttggtggctcatttaagatgaatgttttaaaatggatgaaaacgaataaggcttcttatccgaaaaccgcacttcattttaatatctcaaacgtcgggaccatctggcaatggcaacatatttgggagactgagggtgctgatgccttatatcgttccaaaggacggcaaacaattatgtcagctgataaacaatcaaaaaaacggcaacaaacagagttagaacgtcttagagaagaaaatgaattactacaaatcgagaatgaatacctaaaaaaattaagagccttagtccaggaagaagaaaacaacaagcgcaagtcatccaagagctaaggcttaaacacaaactagtaaaaattctaaaaatagttggtatggccaaaagtacgtatgaatacattattagtcatgaaccgaacggttcatctgaccaatctgttaaacaaaccatccaaataatcaagaagaatcatccagcgtacggttatcgtcgtgtaactggtgaattacatcgtatgaatatcttagtaaatggtagattgtaaaattaatccgaacgctgttcggacaaaaaagatcagcttcctttaaaatggtgtttaccacaaacccatcttttaggagctgatcttttgtctagtataacctattccgaacgaattaaaatcgaaaccttttgtgaactagggctgtccaatatccaaatgggcgttcggctgaaccgatcaccgtcaacaatttcttatgaattatctcgatgtcaaccttatcaggctgaattagcacaaacagatgccgaatacaagcgatcacgatgtggtcggaaaactaagctgagcgatgagttaaagcaaaaaattctcaaccatttacgtctaagctggtcaccaggaatgattgctcacgaatttaaactagctactaaatctatttataattggctaaatcaggggagaattggtttctccttgaatgatctacctgaacatggcgtacgccaacggcgtaacgttgaccaacgatccaaatataatcaatctttggggcgatcaattgaacagcgtcccatgatgattaatcaacgtaagcgcatcggcgattttgaactagatacagtcgttggtcctcgtgggcatagtaaggcagttttattaactttaatcgatcgcaaatcacggttcctttgggcataccggttaaaagatcggacgacagcgactgttaatgaagcactaactaagttcctaaccacttttaatggtccggtgcacagctttactgtggaccgtggcactgagtttagtgggctagtatcacttgaatcacaatatggtattaagacctattactgccatgcttatacgccagctgaacgtggtagtaatgaacgctttaatcggaatttacgttatttttatcctaaagggactcgttttgagcacattagtgctcaagatttaacgacgacgttactccaaattaaccagcgaccgcttaaaatactcgactggcaaacaccgtatcaggttatgctgacaaatttgtccaaaaattcggattaaatttgcaatctaccaaatcataaaaaagtacttgtcttaatgcgagaactgcaattactatcaactgcatttaacaaacgtactcgtaaatataattcatatagaggcaatgttggtaccgttgctaagaacttgatcaaccgtcgtttcttcactgatcgtccttatcaaaaactagtaacagacgttactgaagttcgctggggaaccaagacaattgatgaacgcgcctatttcacatgtatttatgatttattctcaggtgaaattctcagccatcaagttagtaaacaccctactgttgaatttactacaactgttttgaatcgagcagttaagaaaatccctaagaatttaaaataccggacaacagtcccctcagatcaaggattttaataccagcatcaagattggactcatatcttgaaagaacatcgcatttttcaaagtatgtctcgcaaagcaacatgtttagataatgcagcaatggagagctttttccatattatgaaagccgaagctttctaccaaaaagaaaccgatacttatgaaacgctagtttcacaaatatcggtttggattgatgattataatttttcaagaattaaaacaaaactgggttgtaaaagtccgattgaatatcgaatttttacaacccagaaagctgcttaaagtttcgtccaatatttggggttcacttcactcaacctctttttctatgcattatgatgatcacttgtttgtgtgatttgattaattttcgcgtgtaattcatggacttcagcttccttatccgctaacgctttatcaaatgttctttgattctttattttttctgcttcaaccgctgctttaatttgagcagcttgattgtcgcgtaattcagtgacttctttggtcatttccttttgtgctttccgttggctcaacgtgctgccagtcgctgccaagaaggtaatgatggcgccaatcaataatgacaccaaaataacgatgattaatggccatttaacatgggtgaatccaaagttaatggcgactggttcaacgtttaaaacagcaaaaattacgacaattaatgctaggaccaatactgtaattaatcgaccttgttttttcataaaactgccccccctacttcttattcaataagttaccggcaacatagtctccgatatgtggtgccagttgatagaattgtgcaccgatcgccatcaaccatggtgcattaatttcacgttttgcatgcccgattgttttcacaatccgataagctagttgatcaggatctaaaacaacccaatcgaccgatttcaaataattaccggtcttatccgcaatatcaaagaaagctgtatcaatcggcccaggattaacggtagtcacttgaaccccaaatggttttaattctaagcgtagaccatttgaatagccaacaaccgcgaacttagttgccgaatagatggccgacttaggcgttgccatcttgcccgccattgaagcaatgttaatgatgtggccgctaccttgttcaatcatcatccgcccaaaagcgcgcgtcatgtacattaaacctagcacattaacccggaacatctgctccacaacggtcatggatgtgtcgaatgcattttcaaaacttccaaaaccagcagcattgactaacacatctggaatcccgacttcagtttgcacctgagccacaatggtttcaatcgctgctggatcactgacatcgaggacatatgcatacgccggctgtcctgaaagccggtgtgcttcttcgcgaaccgccgccaattcagcttctcgacgggccaaaacgacgataattgcccctttactagcggcttcataggcaatcgctcgtcctaaaccagacgatccgccggtaatcaccacaattttacggtttaaatctctcaatgctgctaatttagtcatctgtttactcctttcgaccatgaaacggaatgtcatagatatctaagtcactaactacttttgtgtttttaaaaatatcgcgggcatcattttgtaaatcacgcactgcttgcccgaggtaccgggcagaaatatgggtcaataataaccgcttcacatgcgcggcttttgcgacctttgctgcattaatgttagttgaatggaaatattgacgcgcaatcttttgttcttgcttaccaaaggtcccttcatgcactaatacatctgcattagccgctaagcgttcaattggtggacattggcgggtatccccaataatggtcacaatccgtcctttttgagcatgtccaatgtaatctttgccatcaatttggcgcccatcagcgagtgtaaccacttctccctttttaatctttgcgtatacaggaccagccggaacaccatctgcatgcagtttctcaacttgcagttcccccggatggtccttttcaataatccgaaaaccataactggcaatccgatgatccaatttagcacattcaacccggaaagtcgcatcatcaatcaaaacaccttcttcaggaagaatgacaaagttcaatggatacgttaaatgactttcagagatttttaaactcgtgcgcacgtattcttcagttcccttagggccgtaaatcgtaagtggttcgtcgccaccttggaaagatcggcttgataaaaagcctggtaacccgaataaatgatccccatgtaaatgtgtgagaaagatctttttaactttgcgcggttttaatgtcgtttttaagatttgatgttgcgttgcttcaccgacgtcaaacaaccacacttcatttcgttcatccaataatttcaatgcgacacttgtgacgtttcgttgtcgtgctggaactccagcgcctgttcctaaaaattctaattccatttagctcttccaatctgtctttaattcaacgctttattttgccgcgagggctttggtaataatggcggcatattcattgaccccagttgggttcggatgcaccttatcttggtagaaccagtcactgtgtttggcagcctgtgaataccaatcaatcaccgttaagtttggatactgtttagttgcatttttaagcgcctggttaacatcattttgccaaggacgcgttgggacaaacgcgttgagccaatagacttttcgcttagtcccaatggctgccataaattgcgccatctgttcttgcgtaaaggcgccatttgttcctagactgaccagtacagtatcgctaagggcttgtttttgatcataatcttttacaatttgaatactttgatagagttggcgcccaacagccgcatcaaccaacatattcgggaataacttctgtaaagcttgactaccgtcgagtaggacggaatcaccaattgcagtcaccgagatattctgggcccgttgaatcgtcacttgactcaagccatatttttcaaattcttggttgattggatgcttttgcgcagccgcctcagccgctttttcagcttttgaagttggaccatttgcttgtccagctttattctgggcttttgcttttttaatcaacgcatccttacgcttttggttagctttttgattttgcttaatattgaccgctaatgccgatttatgcgtatctggcgccggttggaatggcgcttgaaacgccccgactaacccgattaaaaagacaattgcgagtccagtcactcgaccaaccacccgattccaatgtggttggtgcataaattgcttcaattggtgccataactgcttgtacggatagtgtgctagtggctgttcaataaaccggtaggataattcggtcaatccgaaaataatcgccacttcaatcactggatataaaaccgggtgatcagcgatatttttgaagattatttcaaagaaaatcatcaccggaaattgatacagataaatcccgtaactccgtttacctaaccagttaaagaccggattcgtcaataaccgattccaatcagcgcctggatgagcgacaactgccactaaaacacagactaaagcactaaacagaaatagtcccccgcgatagacaagactactctcggcattcaacttaaccattaaccaaaccaaactgaggacactcactaacccgatgccatcgaggacgaggcgttgtttaggcacaatcttttgcttaagggctgttgatggccaaacaaacgccagcgctgctcctagtaaaattgaaaagacccgcgtatccgttccataatacaaacgactagggtcagcattgggttggtacaaaatggccatccagattgctgaaacaacactgactgctagtaatacttgggcaatccgatttttattcttaagaccaataatcaaggccacaacgataaaaggccaaattagatagaactgcccttcaatcgatagtgtccacagatgggtaaacggcgactcattattggcaaaccgatcgaaatacgactgaccatgtccaatttgccaccagttataaacgtataaaatgttcgtgataataatctgattaagttgctgtaacatttcccgctgaaaaagcgtgatgtacgcgcccgttgcaaacagcatcgttatcagcccagggtacaatcgttttacccggcgtaagtaaaaactttttaaattaatccattgattttgttcccactcttgaaccaacaaatcggtgattagataccccgaaaccaccatgaagattgggacccctaaataaccaccggtaaaagtatatggcatcagatggtataaaataacaccaatcacgccgattgcgcgtaaaccatcaaagccagtaatgtaacgactattctttaaacgcttcttgcccgccattttttcaacctactctacattctaataactgctattataacaatattttagtgatgtgcctacattaagccctgttattttatgcatcccatagaaaaaggaagcattcaaaaatgaatgtcttcctttcttgacgtgcctattattcgacaaattcaaacgtaaagttatcaattgccactaaatcaccatcatgtgcgccactttcgcgtaaggcttcgtcaatccccattgaacgtaattgacgggcaaaacgcatgacaccatcttgatgatccaagttactcatcttgaagagtttttcaaccttgtcaccagacacaataaacgtgccgtattcatcttgttcaatgatgaaagcaggtgcttccggttgatattgataaagtttttgcgtttgaacttcttcgacgtctcccattgggaattcagtcgtttcagctaataagtcagctgtcttgttcatcaatgattgcaccccttgatgcgtgatacttgaaatttcaaaaatctcatgtgtatcgccggcagctgctaatttttgtttaaactcggctaataattcagaagaacctggtaaatccatcttagtcgctacaatcacttgtggtcgttctaagatttttggatcataggtctctaattcgtgattaatttgttggtaatcttcaaatgggtcgcgacccgtttgatcgtccatttcgattaaatgcaagacaacccgtgttcgttcaacgtgccgtaagaattgaatccctaaaccaacaccgtctgaagccccttcgattaaccccggtaaatcggctaagacaaagtcccgaccgtcatcgagttgcaccatccctaagttagggaccaacgttgtaaattggtaactagcaatcttaggtttcgcacttgtcaccactgacaacaacgttgatttcccaacagatgggaaaccaaccaacccaacatcagcaagcacttttaattcaagttgaatgctgcgttcttcaccaggttcaccgttttcggcaacttccggcgcactattacgggcatttgcgaaatgcatattcccacgaccaccacgaccgcccttagcaatcactaattgttggccatcttcggttaaatcaccgagtaattcattggtttcagcatcgcgcaccgttgtaccaggtggcacttgaacaaatgtatcctcggcaccgcggccgtacatttgtttattctgaccattaccaccactattggctttaaagtgatgacggtaacgaaagtccattaatgttcgtagaccttcatctaccactaaaatgacacttccgccccgaccaccatcgccaccggctggtccgccaagtggcacaaacttttcacggcgaaatgcaactgcaccatcgccgcctttaccagctttcacatcaattttgacttgatctacaaacatattttgactccttctcatcgttaaacagtaccttatatactaccgaaaaaaagattaaaagtaaacagataactggttaaacactgaattggctctatcatcgataaaaagcgcactgagtgagtgacctcaatcagtacgctttttattcgttaattaatggctagctggcaccaatttaaattggctccatggtttcaaatagtctaataggaataattctgtaggcgtaatacggccaaccacattcacgcgcccgtcatttggcatggctttgagggcaatttgggtttcccctttatactgaccgtaaccgacgttatcgattaaaatatcaccgtgttggatgtcaactgtatggtgggctgggaaaagcaggtctttaaaaatgacccgtgtcatcgttgaccgtagaagatattctgaacgatcgccacgataactatgcagactttcaaagaggaccttgcgttcatcagccgtaatgtcatctgcgacgtcgattgcgattgctgggaattcagcgttaaagacgtcatgcatcgtcttcaattctgcttccgaagcatacgcattaccgacaataatgtcatcaatgttatccattaaaacgtaatgtttcatctgcgttgccatcgttaaatcgcgatcaacttccatcgtgggcaacccatcttgtgttggccatggtccgaaagtcgcttcatgtgaattgacaaacgctgctgtattcaaattgtattttgcaaattgcgccgtacattgtttgaagaagtcttcacctaatcccgagaaccgatgtggatagaagttatgacaacctaacaagttttctcgtttgggtgaataactcataatgttatcaacgtaacttgtcccttgactcatattaatttcaatttttaaattaaacggattgcgcgtcatttccgcttcttcttggccggtaaaaccgttgtccaaccgaattccccaagcaccaagttcatggaaaaaacttaaattatcatatgaaataccgagttgcttgaacaaacccggattgatatcaatcatgacttgcattcctaattggttggcatgggctacaacccgtttaaagttgcctaacacggcttcttgatcgccagacacctccaataatgatgtaaagacgcgttggaacccatattgatgcgctaaatctaagtaagccgcatccttttcaaaagttgatcgttctggataaattgaaacgcctagttttcccatgaatagaacctcctaataattgggctataccaccctgtcatctattagtctagcataccttaagcacttttgaaaactcttacattacttttaaactggtctatttctggcattgtccgcagtttgctcactaacgcaccaatctttttttcggtctatatcagcgttttgatggtttttgaacgtttttgaaatatttcgattgcttttgaatggaaacgatgtcataatgatgctacggaggttttgtcatgttaacagaagaacgtcaccaagcgatattacaacttttaaagcaacaagacgtcgttaagatgcaatctttgtgccagctattgaacacttctgaatcaactgtccgtcgtgacttgcaattgctcgaagaacaagggcttgctactcgaattcacggtggtgctaagcgcatcaacacgttacaagaagaacttggccagattgaaaaaaacggcaagaacgttcatgaaaaaaacgcgattgctaagtttgccgcagcacaaatccaacaaggctgcgtcatttacttagatgccggcacaacgacccaggcaatcatcccctacttaagacctgaaatgaatttgacggtcgtcaccaatggggttgataccgcttctctcttagccgatcaccaaattcaaacctttctattaggtgggcgtgttaagagcaaaaccaaagcgatggtcggtgcggctgctttagaaacccttttgcaattccaattcaatcaggcgattcttggcacaaacggtatcgatgttgaagctgggctaaccacccctgatccagaagaagccactctaaagcgctttgcgattcaacaagcgaaccaaacgatggttttggcggatcacacaaaattcgacgctgtttcgttcagtaagtttgccccattggcacaagtccaattgattactgatcaattgtcaccatctgtttacaaacactatcattcacacacagaaatccaggaggttttatcttgatttatacgattacggcgaatccatcaatcgattacgtcattcaacttgaaaaactaaataccggcaacgtgaaccgcgtccaatctgacgttaagctccccggtggtaaagggattaacgtttcacgcatccttgccgaattagcattaccaagcgttgccctcggctttgtcggtggcttcactggtcaattcattcaaagcaaactcaacaacgcttcgatcgactgtcgattcactgaagtcgaagaagacacccggattaacgtgaagttaaaagacaatactgaagaaactgaaattaacggtcaaggcccacacatttcagcagaagccgttgccaacttgaaacaacaactggctaagctagaagccggcgatattgtcttcatgtctgggagtttgccacctaatttaccggctagtttctacaaagacttaatcccattgattcaagcgcacaacgctgaatttgtaattgatacaaccggtcaagctttgttagacacattggctgaaaaaccattggtcatcaaacccaaccatcacgaattggccgaactgttcgacacacactttgccaaccaaagtgaaatcatcgccgctggtcgcaaattattagaccaaggtgcccaacatgtcttggtctcaatggccggtgacggtgcccttttaatcacaccagaccacgcttacctcggtggtacacctaaagggacagtgattaattccgttggggctggtgattcaatgatcgccggttttgtcggcacattcgcacaacatcacgatgcactcgccgcttttaaaacaagtcttgcttgtggtagtgccaccgccttttctgaagatttagccactagcgctaagattaacgaactcttacctcaaattgaaatcacacaagttgattaattttaaatacaaaggagatttattatgaacatccaagatttactcttaaaagatgcgatgatcatggatttacaagcaacgactaaagaagccgctgttgatgaaatggttgcccgctataaagacatcggtgttatcacagatgacgccctctatcgtaaagatattttggctcgtgaagcccaatcatcaactggaattggcgaagggattgcaatgccccatgcaaaagacagtgccgttcaacgcgcaactgtgctattcgctaaaagtcaaaacggtgttgaatatgacgcactagacggccaacccgtttacttgttcttcatgattgccgctccagaaggcgctaacgatacgcatttacaagccttggctggtctttcatcccttttaatcaacccacaattagtcgctgatttgaaacaagcccaaacaccagaagacgtgcaaacgctctttgctaaggctcaagctgctaaagacgcagaagatgcgaaggaagaagctgaagaagccgctaaagcacaagccgcagccgcaacgccagctgatgatcaaaaaccattcatcgttgctgtcacagcctgcccaactgggattgcccacacttacatggccgaagctgccttgaaagaaacagctgctaaaatgggcatcgacattaaagttgaaacaaacggttctgaaggcgttaaacatcaattaaccgctgacgatattaaccgcgcaacaggggttatcatcgctgccgacaagaaagtcgatatgcctcgttttgatggtaaacatctcttgaaccgtcccgtgatcgacggcatcaagaaaccagctgaattgattcaaaaaacattggatgaagaaggctcaatctatcacgcaactgaaagccaatcaagcgaagaagcttcagctgacaagaaaaccctttggagtcgcatctaccaagatttaatgaatggtgtttcaaacatgttaccattcgttgtcggtggtgggatcttgatggccatctcattccttttggaacaaaccgttggcgcacattcaaccacttttattttcttgaactcattaggcaataatgcctttaacttcttaattccggtccttgctgcttacatcgcgatttcaatcggtgatcggcctgccttaatgcccggatttgtcgggggctacatggctagccaagcaacagccagtgtccttgcttcaaagagtccagccggattccttggcggtttagctgctgggttcatcgctggttgggtgatcgttggtttgaagaaagtcttcaagaacttgccacaaacccttgatggtttaaaaccaatcttaatattccctgtattaggactatcgattgttggctttattatgtacttcatgatcaacccagtctttgctcaaattaacctctggttgagtaccttcttaacacacttaggggctggtaacgcattactacttggtgcgattttaggtggcatgatgtccgttgatatgggcggtcctttcaacaaggctgcttataccttcgcaatcggtgtcttcacaaccaccaaagatggttcattgatggccgctgtcatggctggtgggatggtcccaccattggcaatcgcggttgctgctactattttcaaaaacaaatttaccggtagtgaacggaaacaagccttcgcaaactatgtattagggatttcattcattactgaaggtgccattccatttgctgcatcagatccattacacgtgattgtttcaagtattatcggttcagcaatcggtggtggtttaacccaattatggcaaatcactgtccctgcaccacatggtgggatcttcgtggcaccacttgccaaccacggcctactctttgtgcttgccgtgttaatcggaacatttgtcagtgccctaatcttaggcctctggcgtccagtggcaaaagaagcttaatttaaaaagtcgtagtcaaatgactgcgactttttatttatcttgaaaatcagtattgtgcttttgtttccattcattaatgtaattcaaacgttgtttcatccgcgtttcattgccttgttcggtcggccggtaataaatatggtcggcgatactctctggtctagttggcatcgtggtcaatctatcatcgtagaaatgtgcgagttgatatcctttgccgtaaccgacttccttcatcaatttcgtcgccgcattacgcaagtgcaatggcacgggttcatcaatcgtctttttaatatccttttgcaccgctgtccgcgccttataagtggcgtttgatttcggcgcaagcgatagataaatcacgcactgtgttaaatgcacgtcgcattccggtaagccaatcgcctgacaagcttgaaagacgttcattgctaaattcaatgcattgttatcggccagaccaatgtcctcactcgcaaaacgaacgagccgccgagcaatataaatcgggtcttcgccgccgtcaatcatccgccccaaccaataaatcgctgagtcgacatcactattgcgcatcgacttatgcaaagccgaaataatattatagtgttcctcaccgtctttatcataataggcggtttttttatttagcagttcccccaatagatcgccatcgacggtcacttgatggtcttgcacatcactattaataactaacatttctaaaatattcagcgccgtccgtgcatccccattcgaaaagatggcgacttgcttcaataattcatcactgatatgaaccgttaaatccgggaaagcttggggcgcctttaaaacccgttgtagcaactcaataatgtccgcttccgtcaattgctttagcacaaaaacgcgtgaacgcgacagcaatgctgaattgatttcaaacgacggattttcggttgtcgcaccaattaggataatgctgcctttttcaacatacggtaaaaaagcatcctgttgcgccttgttaaaccggtgaatttcatcaataaagacaatcgtccgctcacccagttggcggttttcttcggcttcattcataatcttccgaatctctttgatcccattcatcgcggcactaaacgtgataaatttcgaagccgtcttgcgcgcgataatctccgccaacgtggtcttcccaacgccgggtggtccccagaaaatcatcgaagtcacttgatctttatcaatcatttcgcgtaaaaacttgcctggtccgactaaatgcttctgaccgacaaaactgtctaaatcagacggtcggacccgattagcaagcggcgcattcatcgccatctcttgatcaaacaaagaggtttgtcccattttttcaccctactttagttgttgttaattgaaacttcttaaaatgtgcccgtaaatgacttaaggttaaactctccgcgtctgaggcaacaagctcaaatggtgcacccatcgccatcacttggcctccttgactaccacctttaggccccaagtcgatcaggtaatcggcattggtcatcaaatcaaggtcgtgggtaatcatcataatggtggcacccttggattttagctggttgatgacgcctactaaggtttcaacatcgcgcggatgcaagccaacagaaggttcatcgaagacgaataaagtgcccgcccgttttttattcaaatgcgttgcgagttttaagcgctgtgcttcgccacccgaaagactcggtgtactttcaccaaggtgtaaataagctaagccaatttctttgagaatcttaagttccttttgaattgctggcacatctgcaaagaccgggattgcttcttccaccgataaagccaatagatcaacgatgctatagccttgccacttgatggcttcaatctctggtttgtagcggttaccatgacattctggacaggtttcttccatgtctggcaaatattgaatatccaaaataatgctgcctaacccaccacagttcggacaggcgccttctttattgttatacgaaaagtgcgcgatcccataatgatgcgcttgtgattctgataaaccagcaaataatttccgcagattgttcatgatactcgtatcagtcgcgagtgttgagcgtgtattcttaccaaccggcttggcatcaatgctgacgactgacgttaaatcggtcgtcaactgggtgacctgctcgggtaattgctcatgttggtggtgcgcttcaattgctggcactaaactatctagaatcaaactcgtcttcccggcgccggaaaacccagaaaccgccgtaatttggttatctggcactttgattgtgacatcatgcagattaaaatattggccaaccgtcatcgttgtctgctcaccagtcgttgcggcagtgactttaggatataagatgttcgctcgaccagcgatatagtggccaatcagggactgtggattctggatcaaatccgcgggtttcccttgggcaatcacttgttccctttgcgcccagcttctggcccaatttcaatcacccaatccgcttgactgatgatattcacttcatgatcaactaccactaacgaattgccttgtgccactagctgccggaaaatatgaattagcccttcgacgttgtcaggatgcagcccaaccaatggttcatctaaaacgtacaacacaccagttgtcgctgttcgcaacgtccgcgccaattgaatccgttggagctcgccagtcgacaatgtattcccattgcgcgacaacgttaaataatccaaccctaattctagtaacggttgcagtgtttctaataggttcttaaataaaattgtcgccatttgctacatttcatccggtaagtcggccttagtagcacgcacccaatcttctaatgcgcctaacgtcaaattagaaactgctgcaatgttttgtccgccaactgtttgggtcagtaatgccggatttaaccgggtcccatgacacgttggacaggttgaaaaatggaaaaatgaattgactttagccattgcccgatcacttttaaccgattttagcgattcataaacagcgtcataagcattttcatagagggtattctccgtactaaacacacggcccgttgaggtatggaaatcaaccgcatacttcgcccgtttaccatgcaggacaatttctttttccttggccgtcaagtccttgtaagggacatcaattcggaccccaatgtgggcagcaacggttggcatgaaatttcggcccggcaatcgccatgaggcaatcgctccgtcttcaatactgagattttcatccgcgatgattttgcgatcatctaacgtttgaatctgccccgtcccatgacattctgggcaggcgccagctgaattaaaggcaaagtcttcggccgatttagccataaactgcacttggcaagtagggcacgtaataatccccattttatcgccagctaagtccatcgcttgggcaatttttagacttggttgaatcacgtgcccatttggacaacgtgtcgtccctaaccgtgaaaaaatcaatctgacgacattaaaaatctcactcatcgaaccaacagttgaccgttctgatggcacacttggtcgttgcccaagtgcaatcgctgatggaatatgccgcacttcttggacttgtgagcgtttattctgcgtaattcggcgccgcgtgtacgtcgacaacgcctctaaataacgccgtgagccttctgcatataaaatccccatcgcaagcgaactttttcctgaaccagacggtcccgaaatcgccacaaattggttcaacggaatatcgacgttaatatttttcaagttattgacgttcccgccacgcacttcaatctacgttggttgttcaattgtcattattggttcgctccccgtttgcttgacggttaaaaacggccgcctctgcttctaaattcgctaaaattcgttctaaatagccgtcaacagctgccacttcagcatccgaaaagcccttgtaaaaaacggcgctcaatcgttgactaacgtcatcaccgacctgttgctgattagcgccttgttcagttaagtcaaagacccgcttgcgcttatcaagtggcgattgctcactcatcaataatccctgttcttctaagcgccgtaacatcaacgataaactactattggctaagccagtcacttgtgccaattccgtagcagtttgcggatgatgatcccacaatgctgacaaaattttcccctgttcagcgttatagcacgcgcgtggatcagccgttaaataacgattaaaaagtcgggtatttaataagcgaatcttcaaagttaaataaccaccctttttggttttcatcccgtccactcctaaattgtttttatatcagcattaattatatcttactatataaaactaattttagcgagtaaaaaacaccatggtcaaccacggtgtttctaaagaagctgtttcaattgttctgcttggacactgcggacttcttcgactactactagcgcctgcttgtcaatcgttgagaccaccggtacgagcgtcgcgagttgtttggccgtacaaatgacatacagcatcggtcggtcattttgactatagtacccttgcgctttaatgatcgtgatgccctggtggaattgcgtcgacaatgtttgggcaatcgttgcatattgatccgaaataatcgtcaccgcgcgttttgccccaaatttagccaacaatttattcaaaacgactgctgataaatacaattcaataatcgttaagagcatattttggaagccgataatgaagccggatggaatggcgacaattaaatcaaaaaaaagcatcgcagagccgttttggatccctaaatagcgattggcaatcttcgctaagatcgtactaccagcaatcgtcccttggcaatgaataataatcgccattgcaatccccatcaagacgccaccaattatcgtcggaatgatcgtctgtgtcgtatggtagccgataaaatgcgggagccgcaagaagatagaaatccagagtaccgcccagaccgaataccagatggtttgcttctctaaatacttaaagccgacaatcactaataaaccgtttagaaccaaattcgtagcagctggcggaattgctaacgcatagtagccaatcgccgttaagccagtcacgccaccttcaccaatatgatgaggaatcaggaaatcattaatcgccaccgcataaatcaaggcgccaatgataatcccgagaccatttttaaaaagtgcttttttctgcatcccactcacgtcctcgttcaaactaacataagcgtaccatatttagggtgggagattaaagaacaattgattaactattaatttacaatactctatatttttcctgtgctaagaaaccatttacttactttagaacactctgccagtcattacttgaagcccatccattgtatatacttccacaatgtccctatcaacaatcagcaatacatcatcaatatttcctgtaatttgacgcctttcaattttcgatgttgcccattgacgtctttcaaaatataaccggtcctgatactttttcaagacaacattttgatagatttttattcgcgcgttttataatcaagttagccaaatacttttagctaattgataaaataaaaaacaccaagacaaatctctgttatcattgatgttcctacacaaacaatgaaagaggttattgtcttgatgcaagaacagaataccacagtcagaaaaaaaggtcagcacctaacttcgtttgaacgaggcagaattgctacgctgcacagccaaggctattccaatcgtgcaattgccagagcgcttaatgtttgtcatcaaacaatcaataatgaattgtgccgcggcgagatcgaccaagtaaaaaaagtgaatggtcaacgccaatattacgctgtatactcaccagaaacagcacaagctaagtacgaagctaatcgagcccactgtcatcgacccttgaaactcgtcggtgtcgctgattttatcgactattttacgactcatttgcgtcaagatggttggtcgcctgatgcagcagtaggacgggccaaacttgaaggcttatatcaacctgaggagatggtctcgaccaagacgctataccactatattgatgcccagttacttgaagtccgcaatcttgatctactcgaaaaaacgcgccaccgtgccaaacatcatcactcgatcaagcacaagcgtctggccggacggagtattgatgaacggcctaaaagtatcgaccagcgccaagagttcggccatttcgaattggacaccgtggtgggcaagcgcaacggtcaagagagtgtgatcttaacgctgatcgagcgtcaatcccgctgccaaattctacgtttgatcgatggtcgtgatgccgattcagtcaactatgagctggcccagatctgtcaagaatacggatcaatcatgaagtcagttactgccgataatggcgctgagttctcggaagttggcgctgtacttaccggtgtcgctgacctttattatgcccatccatctcgttcctctgagcgcgggactaacgaagcgcataatcgaatgatccgccgcgatgtacccaagggtctatccatggatattttgggtcctcatgatatccaagcagttgagtcaaagctaaacaatttaccgcgccggcaaactggctatcaaacacccaaagagcttttctccgctgcttccgccggttaagttaagtccataaaatatgaatattaatgaaaatactgatttaataggatttatcgtgtggctaatttgttcttgcaatttgggacgctgttcaaccttggttttggaagccgaagccgctttccacttattgacggtaacggagtggctatccagttccttcatgagccgggaaatccgtcgtggactgcaccgaagctgcagtggttgaagttccagattcaattcatggtggatcttcataacaccgtatcgctgcttaaattccgcaaagatccgcagaatccgttgtttcaagcccgcatcttcggcccggcgttttgaaggtttgggggatcgataacgataatactgagctctggaaacaccgaggattcggcacatcttggttacctggtggtgatggctttcttggtgaatgtaatcaaagatattggttacttctgcgcaaggaagcccagggctttttttaggatttcgttctcctcagacagcgaagccagtcgcttttccatcgctttgatttcgtctggcgatttaccggattgagttttggcctggccctggatccacttatgaactgttgaatagccaatgccatattctctggccagttgggcagctgattcgccttgcttatataggttgataatgttttgtttgaattctttgtcgtaacgagttggcatgtaaaaattccttccttttgagagatgatttattcattataccctctcttaaaagttgtctcaggaatcagcttacatccaattggctactaagtgggtaaaaaaaaccattaaccaaccattagcaccctaaaaaagcctaggtcagacaaataatagttgtctgacctaggcttttaaagtgataatttaatcgtttgcgccacagtcttagaaatcccgagtgcttcgagttccgccactgaagcttctttgatatgtttcatcgaaccaaaattcttcaagagttttgtccgcgtcttaggaccaacgcccttaatatcatcgagtttagaactcaaggagttctttccccgcaattggcgatggaaactgatggcaaaacgatggacttcctcttgaatccgcgttagtaagtagaacccttggctctttggatccaactgaatggtttgatcaacttccccatataacaacgaggcggttttgtgatgattatccttgaccatccctgcaacgggaattgatagccctaattcgttctctaagacgtctttagccgcattgagctccacaattccaccatccattaaaatcaaatcaggcagtggtttatcctctttgagcaatcgcgaataccgccggaaaatgacttcccgcgtattggcatcttcgttggcgcctgcgcgatctgtcgtttgcgttaacttatacttgcgatagagtgtcttctcggcacggccatcaacaaacgtgaccatcgccgagacaggatcagtcccttgaatatgtgaatggtcaaacgcttcaatcacgtggccatgtggtaagccaagcgcgtccataatctcatcttgcgccccaacggtcttgcggttgtcgagttccaataaacggaacttctcttccaacacaagccgactatttttctgcgccatttccatcaacgcttttttctcaccacgttgcggcgtgcgaatcggcacattcaaaatttcggtgaggactttcttttcgaccccttctggaaccagaatttcgcggggtaacacattattcttgcggttgtaccattgtaaaataaaggttgccaattcttcttcaggtgtgctgacacacgggaagagccgcttttcacgccgaatcaaccgtgcttggcggatgaagaagatttgaatcgataaccagcccttatccaaataaaaggcaaataaatcgcgcggggtattatcgttagaaataattttctgcttttcaacggtggcttcaatgtagtggagttgatcgcgcaattctgcggcgcgttcaaactgcatctcttcagcagccgtagtcatcttggccgtcagttcttttttaaccggatcaacttgcccattcaagaaacgtttaatctccttgatttgggccgcatagacactctcaggcacttctttgaaacacgcgcccaaacattgacccatatgataatacaaacagggccgcccttgatgtccctgacagcgtcgtaaaggataaacccgttgtaagaatcgcaatgtttcttgggcggcatacacgtccggataagggccaaaataaaagccgccatcttttttgacatcccccgtgatcagtaggcgcggatcgcgttcattcgtaattttaatgtaggggtagcctgtgccccgcttaagtttaatattaaagtaaggttggtgtttctggattaacgtaatttccaacaaaaaggcctctttatttgtcgatgtgatgattgtttcaaaatcgacaatttcagagaccaatttggccgtttttccttcgtgactactcttgaaatacgagcgcacgcggtttttaagattttttgctttacccacatagataatcttggcattgatatccttcatgatataacaaccaggtaatgcgggtaagagtgctaatttatgttcaatgtgttcgcttgccaaaaacaccactcctttaattcaaaacaagtgttcgtctttctattttacgtgtttttggctaaattgcaactattgtgctaggaccttggctaaaaattgttgcgtccgttcttcttgcggatggtcaaaaatggcttcggggtcccctttttcgacaatttgactatctgccatgaaccagacttcatccgccacttcgcgcgcaaaccccatttcgtgggtgacaacaaccattgtcatcccttcttgtgctaagtcttgcatgaccttgaggacttcgccgaccatttctggatcgagcgcagatgtcggttcatcaaataacaatacgtcgggtgacatcgctaatgcccgcgcaattgcaatccgttgtttctgcccaccagagagttgatcactataagcatccgccttatccgctaaaccaacgcgttcaagcaacgcttttgctttagccgttgtttcggccgctgattctttcttcactttttgtggcgccaacattaagttatcgaggacagttaaattggggaaaaggttaaagttttggaaaaccatccccatctttgtccgaatctgatcaagctgtttttcagataacgtcatcaaatcggtgccttcaaacagaatttggccactcgttgggtcctctaaacggttcaagcaccgcaataacgtactcttacccccaccggaagggccgatgacaacaatcacttgaccagcttggacttcaccactaacaccatttaacacgaggttgtccccatattttttaaccaattgattaatcttaagcatgttgcatcttcctttccacatagttcaaaagtttcgagagactaaaggtcatgataaagtagatcaccatcgcaacaaaaatcggtgcaacgcctttataagttgctgattgaaccactttgagttgataaattaaatcagtgaccccgataatggaaacgattgaactttccttgattaaagaaatgaattcgttccctaaagcaggccagatattcttcagggcttgtggtaaaacaatgtaacgcattgtatcgcgttgtgacaagcctaaacttcttgaagcttcagtttgcccagcatcgatcgcattgatccctgaacggataatttcagcaacatacgccgcactatttaaggaaacggcaattacccctgccaaaagtgctggaatgttgacccataagccaatcccgaagtagacaaacatgatttgaatcatcaacggtgtgccccgaacaaattcgatatacatgactgccagcgcacgcaccaacttattcttggccaaacgcccaaaggctaggaggaccccaattaaaatcccaattgcaattgaaacaatcgtaatgaataatgtgtagccaatccctttagcgaagtatgaccaatagtgccacatgctagtgttgtgcgtattgaccttcatgagttggcccgcgttctttaagtattgcggaattaatttttgctttttaatttgcccgatactcttattagcagcagcgactaaggttggcgaatcctttggaaaggcaatcgctgatccttgcatgtctgcgcctaaatcaaatttcccattaatttgaacgagttctggatcattacttgcataggcggttgcgactggttcttccgccacaatcccgtcgattttatgactctttaatgcaaggacgagatctgggactttggccaagcccgtaatctgcgcatctttaatttgctttttagcgagtgtttgttggagactccccgtttggacccccacttttttcccgttaaaactatttttggagtggtaaatcttcgcatcagctttattgactaagattgattgaccaccgagataataaacatcagaaaaatcaacactcttgcttcgttcatccgttggtgacatcgccgaaataaccatatcgactttaccggtttccaaaccaaccaataacgcatcaaagtccatcgacttcaccactaacttaacgcctaaatcatcagctagcttctgtgcgacttgaatatccataccgacaatcttgttcttaccgtttttattcactaaaaattcataaggtgcataatcggggctggttcccaaaaccaacgtttttttagcttgcacttggctaaccgtctgtccagctgccaaaacgggctgctgctgaatcatgaaaaacgttaacattaccatgaatggtaacccaacaaaagtgagtaattttttaatcgtcatattatctcctcctctgattaggactatcatacaaccaattaaataattatgcaatatttatttataaaaagtgaatcattggcgaaaccgttattatctggtatgatagatgcaaattagaaaagagggattacgatgggcttaaaagtcactaacaagaccgatttaaccggtttattcgataaattcgcatcactaccagaagaacgccaaaaagttgaagcacaagttgaagaaacagctgataaattaaaaaaggtagatgcagaacaaaaagaaaagcattaaacaaagacagcaaaaaaggcggtaagacaaattcatttttgtcttaccgcctttttgctggtttaaacgtgcgtcatttgcaatcgcctttcggttaacgcgattgtacgctttattctgcgtgtctttctgggtagcgttgttttaattgttcaatgttttcgcgcgcgactttatcaaagtcgaggttattccattccgcaatttgtgataaataccaaagcacatcgccgattttcttagacatcattttttcatctagttcgtggccttggaacgcatattttttaacgatatcaaccacttcaccactttcacttgctaagcccaaagctaagttagttaacacttgttcgttaccatataacgttcggttggctaacttttgatagtcattaaattccattatgcttgtccccctattgcacattgcttttcaatccattcccaaactgtctctttaccagcaccagtcagtgcgctaaagcagacaaattgatcgactggattaaaatcaagcgcttctttgatgattttttcttgacgattccatttccccgttgagatcttatccatcttagtagcaaccactaaaacagggatatcataatacttcgcaaaaacgtacatcgcgatatcatcatcggttggttcgtgacggccgtcaattaatgaaataagcccctttagatttgagcggctggttaaataagcctcgataatttgcccaaacttctcacgttgcttctttgaaactttggcatacccataaccagggacatcgacaaagtaaagttcgttttcaacgcggtaaaagtttaaagtctgtgtcttacctggcttgctagatgtccgggcataactcttacgattgattaatttattaatcaatgaagacttaccgacattcgagcgaccagataacgcaatttcaggtaattgatcagttgggtactgcgaagcagctaccgcactcatcaccatttcaacatcatgtacttccataataacctccgattatttccttcgaatgttagtttagcataaataaataattattgcgccgttgacatctctctagtttcatggttaacatatcttcttaaccccgttaaatcgcgtcattgtaccgtttcaaaagtcccttaatgcaaaaaaactgccgcgacaaaatctaatttgtcccggcagtcttttaatttttatgacgcttcttgtccgtcagctaaaaagagttgtgggttggctgtgccatccaccgcttctttcgttacaacaactttagccacgtcttcacgacttggaatatcaaacatcatatccatcatgacttcttcaatgatcgaacgtaaaccacgggcccccgtgtttcgttcaatcgctagatgtgcaatcgcatggagtgcttctggtgtaaattctaattcaacattatccaaggccatcaacttgctgtattgcttaacgagcgcgttcttaggttcagttaaaatatgcaccaaatcatcttcagtcagtttttccaatgcagcggtaatcggaatccgaccaatgaattcaggaataatcccaaatttcattaaatcttccgttacaatttgttgcattaagctttgatcttcattggtagtttgaccattcttgcttccaaaaccaattgtcttttcacctaagcggtttttaacaatcgtttcgatgccgtcaaaggcgccaccaatgatgaataaaatattggtcgtatcaatttggattaactcttgttgtggatgcttgcgaccgccttgaggtggcacactagcaatcgttccttcaagaatcttcaagagggcttgttggaccccttcaccagaaacatcacgcgtgatcgagacgttttcactcttcttggcaatcttgtcgatttcatcgatgtaaatgatcccgcgttcagcacgatcaacatcgaagtctgcattttgcaacagcttcaagaggatattttcaacatcttcacccacgtaacccgcttcagttaaagtcgtggcatctgcaatcgcaaatggcacatttaaaatccgcgctaaggtttgcgcaaggaatgtcttcccggaaccagttggtccaattaacgcaatattactcttctgtaattcagtatcgccttcttcggccactgacatttggttgacccgcttgtaatggttgtagactgcgacagataaagcttttttcgcttctgtttgaccaatcacataatcatttaaaatggctaaaatttcttttggctttggcacttctagtaaatcactgaaggcctcatctttaaactcttcatcaataatctctttgcaaaggtcgatacattcgttacagatataaacaccagggccagccacgatctttttcacttgatcttgcgacttcccacaaaacgaacacgttacgggtccgttagttgtttctgtatcatctagcatactgggattctcccctttctcgatatacgcttaccgctgtgagtcgttaaaatacacccctacaacgtaattcagactatagcataactatggtctagaataaagtaaagttactcgcacaccgtcaatgacacaaaagcgggtccaaagtaaacaccttgaacccgctttttagcatcatttaaagcttggattgatcagacgaccttatttatcgtctttcacttctacagctgaatcagcaatgatttcgattgctttcttaacaccgatatcatgttttaacatgtcatctgataagacgctacgaacagcagcttcttccatattgtattgttcagctaaactcttaagttctgcagcaacttcttcgtctgttgcttcgatgttttcagcttccacaacggcttcaagtacaagacttgtcttaacgcgtttgtcagcatcaccagcgaattgtttcttcaaatcatcttcagttgtaccagtgatttgatagtacatttccgggttgataccttgttgttgcatgttacctaagtattgttgtaattgactgttgatttcttcgtcaatcattgcttgaggtaattcagcgattgttgcattttcagttgctttagcaacggctgtatcttggatagcagcatctgcagcatcatttttttgttgttttaattcttcacgaattttttcttttaattcgtctaatgtatcaacactttcgtcgatatctttagcaaattcgtcatctaattcaggtaattccttagctttcacttcatggattgttaccttgaagatggcttctttaccagctaattcttctgcttggtaatcttcagggaaggttactttaacatcaacgttgtcgtctgctttgtgaccgactaattgatcttcgaaacctggaatgaatgaatttgagccaagttctaatgaatagttgtctgcttgaccaccatcaaaaggtacgccatctacagaaccagcataatcgatgacaacagtatcgcccttttcagcagcggcgtcttcttttaataccaattcagcttgacgttcgcgacggttttcaatttcttgatcaacgtctttgattgtaatgcgacggctttgttttggtacttctaagcctttatagtcgcctaaagttacttctggtttaacggtgacttgagcagtaatcacccaaggttcgcctttttccattttttcaacattaatttgtggttgatcaactggttgaatagcagcttctttaacagcagcatcataagcttctggtaagattgcatttaaagcatcttcataaagggcttcttcaccatacatcttgttaaagatttggcgaggcattttacctttacggaaacctggtgtgttgatatttttacgtacacgtttgaacgcaacgtccaaaccttcactaattttatttaaatcaatttcaaaggttagttcaccatcattggtgccctttttttcccattttgctgacataatttccctccgacagttatattcacaatctatcaattgcatacttaatcagcataaactatttaacctaaattgtaaatatttattggtctaaaaagcgataaaatccgatattttagtcgtttcaggccaacttttatcgaatttaatgcacaaaaaaactcgcagtttttacactacgagtttttcgattcaactaggttgaatattagtcgataatttcactaacgacaccggcaccaacagtacggccaccttcacgaacagtgaacttaagacctttttcaatagcaactggtgagattaattcaacagtaaatgttacgttatcaccaggcataaccatttctacaccttctggtaattcgataacacctgtaacatcagttgtatggaagaagaattgaggacgatagtttgagaagaatggtgtatgacgaccaccttcatccttgctcaagatataaacttcacccttgaagttcttgtgagtttggattgaacctggtttagctaaaacttggccacgttcgatgctatcgcggtcgataccacgtaataaagcaccaacgttatcgccggcttgaccttgatccaatgtcttacggaacatttccaaaccagtaacagttgtcttagcaacttcgtctttcaaaccaacgatttcaacttcgtcaccgacagtaacttggccacgatcgatacgacctgaagcaacagtaccacgaccagtgatcgtaaatacgtcttcaacaggcatcaagaatggtttgtctgtgtcacgttctggagttgggatatattcgtcaacagtagccattaattcttcaacagctttaacgtcgtcagcattgccattcaatgcaccaagtgctgaaccgcggataactggaatatcgtcaccagggaaatcgtattctgataataattcacgaacttccatttcaactaagtccgttaattcgtcatcatcaactaaatcagtcttgtttaagaagacgatgatgtagtcaacaccaacttggtgagcaagtaagatatgttcacgtgtttgtggcatagggccatcagttgcggcaacaactaagatagcaccgtccatttgagcagcaccagtgatcatgttcttaacgtaatcagcatgtcctggggcgtcaatatgtgcataatgacggttttctgtttcgtattcaacgtgggctgtattgatagtgataccacgttctctttcttctggagcagcatcgatgtttgcatagtcttgagcttcagccaagcctttgtctgccaacatctttgtgattgctgctgttaaagttgttttcccatgatcaacatgtccgatagtaccgatgttaacgtggggttttgttctttcgtaatgtgctttttctgccattaaaacgaacctcctgtattttcgcaagaaaaaatcagtgtttagatttactaaactgataatcctttacataatattataatacttcaagcgctaaaatcaaagtgtttttttacacttgaagaattcaaaaatgattatatctgctatgagcgcgtttgtaaacacttaatgctcaaaaaaagtcagttttgaaacgatatttaggtgttttctactctaaaaatcaagttttcctgtcatttcttgcaactttttcacccagtcctgtatcttttctgaaataaccactgacgcggtataatccggacccagtaactgtttgagccatgcttgcgcccactccgtaggattatacatgatttcagcttcaaaaggatataaatatgcaaatcccatctcaacatccgccatcacttgtgctaacaaagtcggatcttcagtggctaactgctcatttaacgccgctaacaccgcattaaacgtcgggctctcctccatcagttggatatcggcaggtacaaaagtttttgtctgttcaaaccattgcatcgtgactaattgttcaatattcagctggacgagcgtttcaatgacagtcgtcttcacgaaagcatgactgtaaggattcgttaaaatgggcgcaatactggtgacataaacattacgtggtaattgttcagcctgcgtcaacattgctagctgttcagctaatgggtgcgcagtgaggttatagaggccctctgcttgcttttgaatcgctgcttggtgattcgcttggtattctaattccgcagccgtaatcatcattctaagcgtcttaatgacttgcggggcaatcgtcgcatggcgtaatgcctcccacacttgatttgccgtaataaaacggtggttattcagtaataatgcaagataaaaccgcactaaatctgtttgttgtaagtagtccgcttgttgttcttcgacgattgtcaatgctgtttgcggatcaccagcttcaatcagcgcactggaccacaataaattcgccgacaacgtctgttctagttgatacgcagcttcaaaatggtcgcatgcttgctgccaattttgttgatttaacgctactttccccatccgtatcagccgatcatactgatctggaaattgcgtaatgtcacccattcaatcacttccttttgacaattaataaaacaatagcgcctagaatcaactgacctgatccagacgctattgtttctaaatgttattcagcggctttttcagcctttggtttattatcttttctttgacgacgatgattttgattaatttccataatcactggtagaatcactggccgacgtttcgtttgttcatacaagtaatgacttaagttttcccggacatcttgtttcaaatgactccagtcaaattctttgttgtccagattattttgcaccgcatttttgataatttcggcactctcagccattaaatctttgctagtcttcacgtaaacaaaaccacgtgcggtgactttcggttccgcgataatcttcttattcttgcggtcaatcgtaacaacagcgataaaaatcccgtcttctgataataatttccgatcgcgtaaaacgatattcccgatatcgccgacaccgctaccgtcaatcatgacgtcagttgcgtcaacttgtccgccaacatgcatcttccctttttcgtaagcgacaatatcgcctttaccaacgatgaaaatatctttgtaatccattcctgtttcatgagcaatatcagcgtgtgctgctagttgccggtattcgccttgaacaggcattaagaattttggttgcattaaattcaacattaattgcaagtcattcttattggcatggcctgaagcatgtaaatcatcgccaaccgccttaacttcgccacccgcacgataaatcatatctttggtcttcgctaaaatcgtttccatcgcgtgtgaaggagatgtcgttaaataaaccaagtcgccttcttcgatgtgaattaaacgatgatgactagttgccatcttttgaagcgccttgattggttcgcccatccgacctgtttctaagatcactgtttgttctggtgcaagtgtgcttaaatctttaggttggaccaagatatcgtcatctggcaaaataatcatcgataatttcattgctgtccggacgattttttctaaatcacgacccgttaaaaccactttacggcctgttttataagccgcatcaatgacttgttgaatccgcataatatttgaagccactgaagccacaatgatccgacccgtttgatacttgaacgtttctaagatggattcagcaatatcgcgttcgttagccgttgcaaatggtgattccgcattagcagaatcactcaagagtgctaaaacaccttgtttgccaatttcagctaagcgtgcataatccgtttgatacattggcattgctgattgatcaaacttaaagtccccagtataaacgacttgtccttcatccgtcttaacgacaatccctaatgaacctggaattgtatgcgttgtcttgaagaatgaaacggttgcgcgttcaaaatcgattgctgtattcgcatcgatgacgtggaagttttggaacttacgtaattttggttcactgctaaccgtaattttagctaaagcaatcgttaattcagacccaaagactggtacatcatgttcctttaagaaataaggaagcgctccaatcgcatcagcatgaccatgtgttaggaaaatcccagcaacacggtctgcattttcttctaaataggtcatatcaggaataacgatatcgatccccaataattcagtttctggatatttcaacccacaatctaatacataaatttcgtcgtccacttcaacaatgttcaaattcttaccgttttcacgaacaccgccaagtggcataatcttaatgttactcattctttcacctctagcacttgaggaatttattccccaaactattttgtttgttttagtcgttcattcgtttaaaactcatccgccttaaagtctaactcatattttatcacaatttaaacaaactaacagcttttgattactaaaagccttttgagcacaaaaaaagcgggtccgcataacggacccgctttttgaaaatgaattaacgacgtaagccaaggctcttgattaattcacggtaacgttgaacatcgctttcacgtaggtaacgtaataagttacgacggtgaccgatcttcttcatttgaccaacatatgaatggtgatctttcttgtgaacagataaatgttcgtttaatgagttgatttctgcagtcaatacagcgatttgtacttctgctgaacctgtgtcgccttcgtgacgagcaaattggttaatgatttcgttctttttttcttgtgaaatagccatgctaatttccacccttctggtataatagcctagaacaacgtaaagcgtcgggtgaacgtcgctaaacagagtagtaggcctgtgcaataagcacttttcaagtttactaaatattagcgtcaaaagcaaggcacagtttcaaactatttaagcagtcaagttgaaatactttacaagtttttattgcaatcactctcactattttggtataataacgactgttgaaattaaaaatcttttttataaagatagtgaaacccatcggaggtgaacaacatgccacaaattaaatctgctatgaaacgtgtgaaaacaattgaaaaagctaaccaacgtaacgcttctcaattaagcacaatgcgttcagcaatcaaaaagttcaaagctgctaaaacagcaggcaacgaagaagctgcagacctattgaaagctgctacacgcgcaatcgatatggcctcaacaaaaggcttaatccatgccaacaaagctggccgtgacaagtcacgcttaaacaaaatgatggctaaataatttaaccacaaaaaagcccccacaaccatttggtttgtgggggcttttttgctttaagcaacatcatctgtcgcaaattgtaacataaacagttcaaacaataaggttgcttcaccttgcccagtctttattttttcttcaatgccctctaaacctagataggcttgggcaagcgtcgccttagaaaagtgccgaatttgttgcaatgctaatttgatgcggtatgggtgaatttttaagacgctcgccaaattaccttggctataccctttttcaaaaagaattttcacttggagtaacaagcgaaattggcccaacaagatggcgttaattttcagcggttcttctttttgtagcaataaatcgtgatacatctctaaaaccggaccgacctttttttgtaaaactaacggcaccaattcaaaaacattatcttcaatactacttgccactaatgcactaacggccgtttcagtaatcacccggctttgttgcgcgtaaagcagtaatttgggtaactcagccataatctgactgtaatcaccattagtcttgcttaacaataacgtcattgccgctggttcaatcgtgacttgttcactttgcagttgcgctgtcactaactgctggacctggcgctcattaatcttttgaacgtcaatgacagttgccatcttcttcagttgtttaacaatcttcttgcgttcatccaacttcgcgtatggcgcgaagataacgagtgccgttgtcggttgtggctgttctaaataagcttggaatccttttaaatcatgatcaagtttagttttaactttttcacctgttaagaagaatggattctgcataaaaacaattcgtcgctcaccgaaaaagggggccgattccgcatcttctaatgcccgcgccacctccgtctgggcgagatcataactcgcaaagttcatcgtcatttcttctgtcgaaagcgttgctttaaataacgctctaacctcttcaatcagcgctgactcttgtcctaatacgagatacaccggtgcaaacgttcctcgattcagtgctgtttttagttgttctgtcttcatttagtcacaatcctttagtgttgttttaatcattggcacttggccaaaaccatagcgccattccagcatcccacagtcagccgtattccaaaatgggacgttcgcacgttttaaagtctgcaacgttgcggcatgtggatgaccataacgattatggcgtcccgcagaaatcaacgccccttttacctgccacgtcgcaattgactggggatcactcgccgtttgactgccatggtgacccacctttaggtaatcaacgcgtaattgtgggtagcgatcaacgattgccacttcacccgctttttctaaatcaccagtaaataaccaactcgcaccaccaatttgcgtttgcaaaacgagtgagtcagcattcccgcctggtccggccaccactggcgctaacacattgatttgttggtgaccaatcataaaatgttggtccgccaaataaggctcaattgcaacttttgtaagatgcggccgcacttgccgttgaaactgccggttttgcggtaagcccgcagcacaaatcaaccgtttaactcggatatgttgcataatttcatttaagtcccctatatgatcagcatcctgatgcgataatgcgattgcctctaaatgatcaatgccacagctgtagaggtaattaactgttactttttccgcccgactcacaatttgccgccgttgccacttttcttgcggtaaagctagtcggccgccggtgtcaattaacaggttatgtcgattgaagggttgttgaatcaacaggctatcgccttgcccgatatcaaacataatcacgcggccaaccggattaaagtggataccaataaaactaatgacatacaggctgataacagccccccagccccactttactcgccgaccagtacttgccatcaaccatagtgtgcctatcacaattaaaaagagtggtattagctggattttaccgaaagtaattgtcgcatatgggaacgttgcaatccaagctaatcctttatacagcgtcgttagcaggccttcttctaaccaaactatcatatgactaacaggccataagcaaatcgctaccataatcaaacccaacatgactggtaagaaaatcggcgcgacaatcccattaatcaaaatcgtcaagatatgccaacgataattaaaccgcaagcacaccggtaaacttaacaagcctagccaaaatgccgttgtaaaagtaccatggcgccgctgataaatcaatccaaaagccatcagatagctcagcaatccccccatactgattaataaatacggctgccataaaagattgaccagcaatacccaactccaactatctaaacgcgattgctgaaaatgacttacttcgcagattaatcgtagtaagatcagcccgatagcgcgtgtaatactcgtgcctccccccacaaacaacgcataaaggggtagcaaacaaaacaagctaacattcacccattcacgcgggactcgacacagcgttgccaatcgacgaatgattgtcacaaagtagaatacatgcaatccggataaactcaataaatgaataatccccaattgacctaacacattctggtaggccaggccatctgactctcgaacaccacataacaacgcctctgcatgaaaactcaacgctggtggcaattgtcggagataaatcagcccctgttggcgccgttggtggaaccaatctagccaaccttgtggtggaatgcgtctaaagaccgttccgtcaattatatttgcttgataaaaacaatgcttttgctgccccataaagcgcgcatagtcgaactcattccggttagtagcaccttggatacgctctaattcaatatcacccgctaataataacggctgattcgtcgtttgccaacggcgtttttccgctgaactctggcagcgatagtagcaaacaacacgttggtcatcattctgcccctgcgccattaattgaatctgatcgccagccactttgatcgtatcgggttgaatcttatatacttgattatttggtctaaccggctgttcgtaggtgcgccgtgccagccaaaaatggcaaccgcctaaacacagtaccagtccactgaccattaacacagctggttggcgtaagcaccacagtcgcagtagacacactatcaaaagacagctaaaaaaaagtggtgcttgtcctagtaataacgcatttaaacttgctaaacaaataactggataaacccagttattcttaatcactcagcagtttgttcattctccaaaaagttaacgagggtgttggcgtcattcgccgttaaatcgacttggtccaattcaataccagatttttcaatcaattcatacgcatattcgtcgttatgataatccttttgataatggattttactgatcccagcttgaataattaatttagtacactgaagacatggaaaatgtgtgacataaatttcggccccttccgtctgcacaccaaacttagcgcattgagtcaaggcgttcatctcggcatgaattgttcgtaaacaatgcccgtcccgtaataaacagccaacatcgatacagtgactttcatgtgccaccgaaccgttgtagcctcccgcaataattcgccgattacgaaccaccaacgcacccacaaacaatcttggacaggtgctacgcatcgacaacaagaccgattgaagcataaaatattgattccacggcattctcttttctgacacacgaattccccctttaaagttaatagttttagtatagcaaaaaaataccattcacaaactaattaacacaaatttgtggccgtaattgttcaaacgttttcggcccaattcccccaactttttgaagatcttcgatttgtttaaactgcccttgctcatcccgatatgcaattatttgttcagcttttttaggaccgatgccatttagcgtttgcaattgtgtcgcatccgcttggtttaggttgattttagcatcagttgatatcggactggctcccgcttgattgtcagtcgcagcctgtggctcgtctgccgctttcactaattcttcggcttgcaccgcttctcccttagttggcacatagataataagttggtcactcaatgtttgcgctaagttcaactgactcgtatccgctgcttcggtcacatcccccgcttgtttcagcacctcaaataaacgcgtctttgcaacacaaatcggataaatccctggatgtgccacagcgcctttgatatcgacaaacccaccttttgagacgcttttcttctgtttgacgggttttgccttcacttttcgcttagttgattgcgccatcaattgttgattggttgatagaaaacgttgttgccgactatgctgccaaaacacaccaccactaagtaaaattatcaccaaacaaggtacccaccagaatcgacgataccgttgccaatagtcgcgccacatttttcgccacctccttattcctaattaccccaaaacgcaaaaaaaatttgccgattctttcgaaccgacaaattttttaatgtttggctaaataatccaatgcgtcgtccaagtttttgacaggaacgattttcatcttagtaccaatttttttagcggctgctttggcaatcgcataattattttgataatggggttctacctttagtatggcttttgtcacgggatcatcaggtgcgaaaaagactttggcgccttcttgactcgcaatcagtaccttcttatcaattccgccgattggtcccactgtcccatcaggatccattgtccccgttccagaaatcttgcgaccacccgttaagttttgtttcgttaattggttataaatctgtaacgtaaacatcaagccagcagaaggaccaccaatttcacccgcatcaatcttaaccggcacttttgtcacaatttttgagtgatctgtcagcgtaattcccaaaccagcgtagcgcgatttaggtaatttaatcaatttacgggtcgcagtcttacgctggccattatgttcatagctaatcgtgactttttgattcactttaagcccttgaacatacttgacgaacttatttgcactcttaaattgatgctgatcaattgccgtaattgtgtcaccaatagccagatcttttttaaaagctgaattatctaaaattgacatcacatagacacccagatattgagtgtggtattcctgatgtgccttttgataagccgcctcaatcgcaaaattaatcgagctttccatgtagtatttttgaatctgatcatacgcttcagtatcatcgtcacccattagttcatcacgactaataatctccgtaaaaggttgtgttttagacagtaatagctgtaaccccgtcactggtccttgaatcccgacggttgttaacataaagtggcccttatgttgatctcgttgaccgttaactttaacaaactggttggtattttcggccgaaccgaccccttcgacgtaataatgcgttgggataaagcaaaaagcaaacacgacgatcaagccaacaatccataggagatgcttcaatagacgtttattcttattcatattaatcactttcaggtcctaatttttgtgcaagcgcagacgcgacaaccggcggcaccaattgttcaacctggccaccaaacgttgcaatttccttcaccatacttgatgagataaaagcaaattcttgctttgctaataataacaccgtttctaaatcagcatcttgtgtctgattcaacgccgcaatatcacgttcatactcaaaatcattggcattccgaataccacgaatcaaatatcgcgcaccgacttctttagcaaaggttgccgtcaacgtcttcgattgtgcgattaccttaacgttatccaagtgttgcgtcgccgcttcaatcagttcaaccttagtggttgcgtcaaataacggttgtttagcagcgttagtcatcaccgcgataatcacttgatcaaacaagtgacttgcccgttcaacagtatcgagatgcccatttgtaaacgggtcaaaacttcccggaaataatgcaattttcggcatatagctgcctcctaaccaataaatttaaagattgctacttctgtaatcccataattctgttgccgtttcagtatgtaatgcggaatgtcagttggataatcaaccgtcgtatcggtttcgcaaagaatcgtcgcgtctggtgctaataaccccatttcgacgaattgttgtaactgaagcaacatctgttgttccttgtagggtggatctaataaaattaaatcgaattgaacaccagcatccgctagtttcaccaacgctttttcagctggcatcttccagattgtaaagcattctggcattttagtaaccgcaacgttttcttcaatcgtttgaatcgctgcatattggcgatcaactaaataagcatgatccataccgcgtgaaacggcttcaattgcgagaccaccgctaccggcatataaatcaagcgcctgcccaccgtcaaaaaattgccccaacatactaaacattgcttctttaaccttgtccgttgttggccgtgttttcatcccagggacagcttttaacttgcgacccccaaattctcctgcaataatccgcatctctattactcctctaattctgccgcatcggcaatttcttgatctgagcgtcctactcgattactgaaatccatatcaatagctggtctttcagaaggggtcactcgtttgacgtagtgtaatttttttaaccgttgcataacagtttcggcatctgccatatctacgtatagataaacatatttcattcgtttcgaggtgtaatacacaagtccgtaacggcgtaattgctttacttgtcgtaatgaatagagccagacgacaattccttggcgttgtgtgatttccaatgtcatttaatcagtccttttacatttagtcaaaaatcatcattgtttgttcatcggtacaaagaagcgttaagtgctgatagcttggattattaatcgcaagttgcaacgctagattctgttgttgtgcaagcaccagcccttgggaattgagcccttgtggccaataaaaaagttgctcgcgctgcggaaaacccgctgctcttaacggagcctgtttaaagtcggttgctgttaaaaaggcgtccgtctcttgtgtcgcttgtttgcgcacttggtgcagcttttgcagtccctttttagtcaaccactgcgttggtgtacttgttaattcactcaccaaattctgtgtattttgcaatggtagttgatttatcgtgagcgcaggttggtcattattttggcgtaatgtctgcaacgtttgcaccaaagcgagttgtcgttgactatctgtttgcggttgttgcgactttgctagctcatccactgggactggtgtttttgaaacaactcgatataaatcagtttgtagcagtcggttcgcatttaaatacatcacagctgtcaatcgttcttgctgcatcactaaagttgcaaacgtctggtttttaaacatcactaacggcgtttgttggtgttgctccggcgttaaccgcaacttaaattgttgctcgtgtaacgtcactaagagcgaagttggtaacgccgtcttcttagttaatgtagcccgcttttgaaaaaaatgaaacggcgccacatcgttgtccgcaccaacaaccatgatttgttgtgtttgattggattggttatcaatcagcgcttcgacatactgtcggctatctaagtgaaataaccaccgtcgttgattttcatcagtcagctgttgctcgaccggttgcccataggttgcaattaattgttcagctggttgattaatcagtttcgccggcccttgtgttttcgtcagtggcgtttgttttattgaccgttcagtcgacggggcttgtgcaaccttaggctgattaaccgctggtgtttggataatcggccaaccataaaggatgaccaaccagacaatcaatgcaacgattaatcggcgtgccccttttatcatgctttcacctcactaattcgctgccgcagcttttttctcttgtgcgctgatgttcaacacgattcccagtgcaatcgctagaaccatcatacttgatcccccataactgatgaacggtaacgtcaccccagtaatcggtaagattcctagcaacccaccaacattgaatagggtttgcacgaaaatgatagtgccaattccgtaacataataaagtgtgatacatcttagtcgcatgaatccctaggtaaaaaatccgtgctagtagcgcaaatagtaacgcgataatcacgagggtcccaatcacacctaattcttcagtggtaatcgataaaataaaatcggtatacggttctggtaagtaaccgcgcttttggatactattgccaagccccaagccaaaccaaccaccattattaatcgcatagtaggaattcactaactgactcccacccatattttccaattcaaatggatgtaaaaacgataaaatccggttgaacttataagaattaacgttcgttgaaaagttaaagtgccgtaaaatactaaataaaatcataaccgttgttgtgaccgctgtaatcagcgaaaaaccataccaatatgacataccggtgccaaaaaacatgactaccatcacagcagccaagatactagcgccccctaaatcaggttgaataaacaccagtaggatgattccagcgactaatacaaccggactaaagaataattttaaattatcaacaaatccgtcggccagttcattttccttacgcgagagcatattagcaaggtaaataacaatcaataacttcgcaaattctgacggttgaatggtcagtggtcccaattgaatccacgcggtagccccattaatcgctgcgcttggtctgaaacgacttaacagcaataaataaatgagcgccaagaaaaccacaatcgtcattgcttttagaaaagtgcgattttttaaaacggataacttaagaaaatatgtgatcatcatcaagataaagcctaatgcgataaacactaattgcttggtaaaatacgcatctggtttcattccgcgaattgacattaaatccgaactcgccgaatagaccattaaagcaccaaatgcacataagataacatatggtagcaataaccaatagtctaaatactgaattttacttttttgaaactttttccacacagttacacctaatttctatttcgttcgtattcagcctgtccttgcccaacttgcatgccaatttgattgacccgttcttctaactcacgcatcaaagttgcaccctgtggcgcactaataagttgcatccgttttgcaaaatcaacctcgcgcgagaaaccaaataattgggtatcaattacctcttcaataattggacattgactcatacaaagcgcatcaatttgagcacgcaatagttgctcaatgcgtagcgcatccgcttctaaagtgagataagctgttgttttttgttcaatcataatttacgcctacctattcgttattaaaaagcatactctgttcgttattataccatatttatgcacaaaaaaaggtagccaagcggctacctctaatggtttttaatgattaaccttttttacgtttcttatcagctttttgacgcatacttgtgtcaagaatcttcttacgtaaacgaacagaagtaggtgttacttcacagtattcgtcatcgtttaagaattcaattgattcttcaagtgacatttctttaggtgtcttgatggcagctgagtgatctttaccagaagcacgtgtattcgttaagtttttacccttagtaacgtttacggcgatatctgtatcacggctgttttgaccaacaatcatgccttcataaacatcaacgccagcgccgatgaataattggccacgatcttcaactgattgtaaactataagttgttgatgaacccgcattgattgaaactaatgcaccgttacgacggcctggttcccagttcttaatcactggcatgtatttttcgaaggtatggttcataattccgtatccaccagtcatcgttaagaattctgttgaataaccgattaaaccacgtgaaggtgctaagaaagtcatccgtgtttggttattagcatcactttccatgttttgcatttcacccttacgttgggccattgagtcgattactgagcctgtatattggtcaggtgtgtcgatttgaaccatttcgaaaggttcgcatgtaacgccatcaatatcgcgatagataacttctggacgtgacaattgtaattcgaaaccttcacgacgcatttcttcaactaagattgaaagatgcaattccccacgacctgaaacaatccaagcgccggctttgtcggtatcttcaacacgaagtgaaacgtcagtgtgtaattggtgacgtaaacgttcttcaatcttacgcccagtaacgaaatcaccttcacggccaacaaatggtgaatcattagcagcaaatgtcatttgtaaggttggttcatcaatccgtaagattggtaaagcttcttgatggtcaactggtgtaacagtttccccaacatagatatcttccatcccagaaacagcgattaaatcgcctgctttggcttcttggatttcaacacggtctaaaccgatgaaaccaaaaatcttagttacgcggaagttcttagcagaaccgtcaagtttaagaacagaaacttgatcaccgatcttgattgtcccacgagaaacgcggccaatcccgatacggccaacatagtcgttatagtctaacattgccacttggaattgaagtggttcgtcactattatcaactggtgctgggattgtatctaagattgtgtcaaagatagggttcattgtatgggcttgtgtatctaaatctgattcaagacttgatgtcccgttgatggcacttgcgtacacaactgggaattcaagttgatcttcatcagcaccaagttcgatgaataattcaagcacttcatcaacgacttcttcaggacgagcgcctgggcggtcaattttgttaatcaccacgattggtgttaaatgttgatctaaagccttcttcaaaacaaaacgtgtttgtggcattgtgccttcaaaagcatcaacgactaataacacaccatcaaccatcttcatgatccgttccacttcaccaccgaaatcggcatgtcctggtgtatctaagatgttgatttgtttgccgttatatttaacagcagtattctttgaaagaattgtgatcccacgttctttttcgatatcatttgtatccattgcacggtcagaaatttctgcgtgaccatccaatgtatctgattgttttaacatttcgttaactaaagttgttttaccgtggtcaacgtgggcgataattgcgatattgcgaatgtcttctctttttttcaagtgtttcagcttcctctcgctagtgacttgactagtgttgtttgtctcatgtatacaagctaatattttaccataaaaaaatgggctgtgcttcatatattagcgtttttttgaaaatacgcaagtttttttcatgaaaatttaattatctttaatcatttgaaccattcataatcgtgacaatttcttgtattgcttgctttggcgcgataatcatcccttcttttcgcatcatggaaattggttgaccatcaaattgtaaaacttgaaaacctaacgtctcagctaaaacccgacctgcagcaatgtcccatggcgctaatttggagatgtaagcttgcacttgccccttcaacaaatgggcgaaagtgataccggcgctaccgtaaatccgcacacccgaacattgatacaacacctcttgcaagtgtgcttcattggtgaccagcatccgtgtattgacacagattaacccttcttgcaacggctcgtcgacagcatttttgagggcagcttcgttttcgaatattcccaactgtggaccgccccagaacaattgatcggccatcacatcataaataatcccgaatagcggctgaccgtcttcataaacgccgatcataatggcgaaatttgcccgttgcttcacgaaattcatcgtgccatcaatgggatcaataaaaaaagttagtccctgttgccaatcatcaggcacctcaccggcaccttcttcccccactaattgcgcgttcggataagccgtcttaatcttttcagctaagaaagcttgattagcacaatcgacattagtcactaaatcattaggcccagacttagtactaaccgttaatggttgtttaatttgtgtgcgggtataggcagctgcttcaaggatccacttttgcagcgaacgacttaaccgatacaatgcttcttgttccattttttcatccactttcactaattaagcgtcattttgatttgggttcgactactcctctttgcagcctgcatacaccgatatattgaatagcctgacgcttctgaaaaggccttatcaatttgtttttcttgcatcttactttgaacaaccactttgaagtcacgataagcagcttgtaaatccgcaactttcgcaccaaattcataagcttgttcaacaagattatataatttcatgacttggacaacttcagttggcgtccagtctggttctaaaggataactatagttcgtttgcataaaggctcctaaaatttgcataaatttgcgccagtttcaattctactgatgccattaatctctcacattataacgcatttttttagaagctgtcgaatccttttagaaatagcggaatcaaaaaacgacgcactcaactggtgcgtcgtcattctaaactatttattaaatatgaattggcaatcctaatgctaattcggcatcatccataatcgcttcacttaacgttggatgtggatgaatggttagagcaaggtcttctgcattcatgcctgattcaacggctaacgtcaattcagaaattaaatcactcgcgccaacgccagcaacttgagcgcccagaactgtgttgtcatccgtattcgtcactaaccgcacgaaaccttctgtatctgctaatgataaagcacggccattagctgcaaatgggaacttaaatcttttagcgttcattccttttgccttggcttctgcaaccgttaaaccggtcgttgccaattcaggatctgtataacaaacagctggcattgcgtggtaatcaaccgttaatttcttaccggcaatggcttctgcagccactttagcttcataacttgctttatgcgccaaagctgctccagcaacgatatcgccaatcgcatagatgcccttaacgttagtttggccttgttgatcaacttcaatcaaaccacgatcagccatcttaataccggcttgttcgagtcccatttcgtcggtatttggccgacgaccaacagtcaccatcacgtaatcggcaacaagttgttcttctttgccgccgacttcatatttaaccgtcacattttgatcagtttcaacagcttcttttgccattgcgccagtaatcacatcgacccctttagctttgaagttctttgtcaccaattgcaccatatctttttcgaagttaggtaaaatcgagtctgtcccttcgagaatcgtcacatgtgcacctaagttggcataggcccctgctaattcagagccgatatagccaccaccaatgaccactaattcttttggtacttccgttaagcttaaaccaccagttgaatcaataacccgtttattaaatttgaagcctttaatttcaattggacgactaccagtagcaatgattaaatttttaaaactgtacgtttgtgcactctcttctttaatcacgcgtaagctatgttcgtccactaaaaaggctgaaccgtctaacacatcaatcttgtgttttttgaacaacattgaaatgccaccagttagtttttcaacaacctcatgttgtttccagtcttgcgttttcgcaaaatccaatgttgctccagtagtcgtcacaccaaagacagatgaatctttcgcctcttgtagtcgatgaccagctgaaatcaaagccttggaaggaatacagccgacgtttaaacaaacaccgccaattgtttcacgttcaatcacagttactttttgacccatttcggccgcgcgaattgccgcaacatagcccccaggacctgaaccgatgactactgtgtctaattcaattgcaaaatcacctacaaccattttaaaatcatccttccatcaataatagctctggatcagctaataattcttttaattcgttcatcgcacgttgcgcagttccaccatcaattaaacgatgatcaaatgatagtgataatttcaagactttgccaacagccaactcaccatcagcgttgacgattggttctgtcccaattcggccaacccctaagattgcaacttcagggtagttaacaaccggtgtaaaccaaccgccaccaattgatccgatattactgattgtcattgaaccaccactcatttcagctggtttcaatttgttatccaatgctttttgcgtattttcgccaatttctttagcgatggcaaaaatactcttgctgtcggcatccttgatatttgggacatagagcccgtgatcagtatccgttgcaattccgacattaatgtagtgtttataaacaatttcgttagttgcatcatcaattgacgcgttcaaagttgggaagtcacgtaagaccgttaccaaagctttaacgatgtatggtaagaaggttaacttaatgtccttcttagccgctacatccttgaatttcttacgatgggtcatcaatttagaaacttccacttcatcgaataaagtaacgtgtggtgccgtatgcttgcttgtcaccattgctttagcaattgctttccgcgttggtgacattttttcacgtgtttcccgttctggtgtcgcagaggtgtatggtgtcgcagcaactggttgtgcagctggtgttgctggcgacgttggttgttctgctgtctctacagcaggtgctgtcgttgttgcagcgccattttgcatgaagatttgcacgtcttctttagtaatccgaccatgtttaccggtggctggcacttgactgatatcaacatcgttttcacgtgcgaattgtcgaacagatggcatagctaaaatcgtccgattttggtcactaatcgcaactactgcttgactgcttggcgccgttgttttagctggtgttgattctgacgccgtagctggtgcttgttcagcagatgttgccgttgccgaattgtgacctggagcatcaatttcgaccaatacttgaccgacagtcgccacttcgccttcaccgactaaaattttaacgactttcccactaacaggtgatgggatttcttcaactgatttatcattttgaacttctaataaagtgtcatcttcttgaatggtatcgccttctgcgaccgcccatttttgaatttcaccttcggcaatcccttcaccaatatctggtaatttaaattggtaaacaccacctgcatcggttgcagtcggtgttgcttcgggtgtagcagctggtgttgccgtacttggtgtatcgttaccttcaacacctggtgcgtcaatttcaaccagtacttggccaactgttgccacttcaccctcaccgactaaaattttaacgactttcccactaacgggtgatgggatttcttcaactgatttatcattttgaacttcaagtaagacatcatcttcttgaatcgtgtcaccttctgcgactgcccatttttgaatttcgccttctgcgatcccttcaccaatatccggtaatttaaattgatatgccatacgtctaacgtcccttctttcgttatcgactaaaagttaataacttctttaaccttattttcaatatcagttgcatttggtaaccaagttgcttcagcttgtccaaatgggaatggcgtatcaggagctgaaacacgtgcaattggagcttccaatgaaagaacagcacgttctgaaatttcagaagcaacttgtgccccaacgcctgcttgtttttgtgcttcttgaacaataacgacccgccctgttttttcgacagaggcgataattgttgcaacatctaatggtgcaattgttcgtaaatcaattacttcagctttaatattctctttagctaggttttcggccgctttaatcgcttctctcaccattgcaccgtaagtgatgattgaaacatctgtcccttcagtaaccacagctgctttatcaagcggcactgtataagattcatcaggtacttcttcgcggaacgaccggtataatttcatgtgttcaagatacaaaacaggatcgtttgaacgaatcgcagaaatcaataagcctttggcatcatatggattacttggcacaaccacgcgaatccctggaatttgcgtgatcattccttcaaagttatctgaatgtaattctggggtatgcacgccaccaccaaatggtgcacgaatcgtgattggcatgttgcgtgtgccacccatccgataacgtgtccgtgacatctggccagcaatcgaatccattgtttcgaaaacgaaaccaaagaattgaatttcaggtacagggcggaagccttctagtgctaaaccgattgataaaccaccaatcccagattcagctaacggtgtatcaaaaacgcggtcttcaccatgtttagcttgcaacccttcagttgctcggaaaaccccaccgttcttcccaacatcttccccgaaaatcaagacgttcttatcatctgcaagttctaaatccagcgcatttgtaattgcttgaatcatcgttttttgtgccatcttaattcgactcctttgcactgtactctgcgatttgttctttaatgttttgtggttggtcttcaaatgtaacattcaagaaatctgtgactttttgttttggcgcagcatccgcttcgttgatggctgctttaatgtctgttttaacttgttcgatcaattggtcttcttgatcttgtgaccaaagtcccttatcagttaagaaacgacgcattctaacgagtggatcacgtttcaaccaaatatcgtctgtttctttggtccgataacgagtcggatcatcccctgataatgtatgtggtccataacgataggttaatgtttcaattaagaccggtccgttgccagcagttgtaaattcacgcgcttctttcatcacttcataaactgctagtggatccatcccatcgacttgaatggcagaaatcccagctgcgacccctttttgagccaacgttacagcagctgtttgtttttcacgtgggaccgaaatcgcaaagccgttattttgaacaacgaaaatggctggtgctttaaaagcacccgcaaagttcaagccttcatagaaatccccctgtgaagtcccaccgtcaccggtataaacgtaaacagcattttctgattggcgcttcttcatcccaaccgcaacacccattgcttgaatgtattgcgcgccgataatgatttgtggtggcatcgccttcaaagattctggatacttgttaccgtcaatatggcctcgtgaccataggaatgcttgtgataaaggtagcccatgttgcactaattgtggcacatcccggtaaccagggaataaaaagtcgtctttagtcatcgcaaagttacttgctaattggctggcttcttgcccagcagttggtgcataaaatcctaaccggccttgacggttcaaagcagttgctcgttgatcaagcacacgcgaccaaaccatttgtttcatcagttcaaccaattggtcatcactgagatccggcatcaattccggattaacaacctggccagtctcatctaaaatttgaacggtcttaaaatcttggctctcatcgctcaataacttctcaaaattaactgcagctttattattgaccatagtatccatatctcctctttaaaaaactgttttaatgactgcttatatctgtattacttaagcatctttacaagactaatttagcatttcacatcactaaatgcaagcgttttataagctatattagtcagtttacgctttcattagtttttattacatgtgaatctaatcactagttagctaattttcacgtctgttctatatctgttataatttaatttcgttttctgttatataatagcaaataataggcacaaaaaaagagtccgccgtagcagactcatcgttaaatttaagttggggtagttctatgccaagaccggttggggtatctcagcgttgccagcatgcactaagagctcttgaaacactctgactactggtttaatttgttgactgacttgcacgcaccgttcacttacccgcaaatcatttaaatcaatcgcaaccttaatttgaccaaggttgactaacttaatcattgttagcaggattgccccgacaaccaacgttgccaagcccatgaaagcgaattgattaaccattaatactgcacaaaacgaaaccaatgcagctaccgccatcataaaagtgcttcccactctaactttaggtgtttgtgctttagcaccaatcgttgcatctagcacaacgccgtgcaccatttcagtcactacttcgcccgcttcaataacgttaacatctttgttaactgttgcgattgtaacgggtgtcttttcgctagcagccaatactaaaatatcaccgggcacaatttgatctgcaccgattaagcgtaaaaaaccatcacgcataacgctaacccgtgcttgtgaattttctaatactgcttctcttttagcagcttcgacagttgttaagccacttggccgagttgccaataaacgcattaacatcccactgcttttaatgccagtgatgttaacgtctttttttaatttcttgtgcatcgcgttcgacactccttcccttttgaggaagtcgtcgtaaaccgctagcctaatgctggcagtaaaatgacagaccacctcgaatgatcaccatcgctactacttacaggtccttcagctgttttcatcattttactcaccagactttctctactttaaatttagtcataccgctttatccgacaaaaaaagacgcacaacaattgagcgtcatccatttatcatggcgttcccaatcgttcagttttagcactatatgacgtagaaaccatgttcagctacgttagaaaaagccttcattggcagtttcagttgactcaattggcatctctcgatgtttctgagtagcagcgtttgttcatataggagcctcacctaacggaaaagcaatatatctatactcttatactacccgtttcactttagcaggtcaagcaattcattccgttttaacttgaattgtgctagaataatgaatgacgaattaatcggaggtcttaactgtgatattaatgaaagatattatccgcgagggtaacccaacacttagaaaaatagctgaacctgttacttttccactatcagatgaagatcggcaacttgctgctgacatgatggcatttttagaaaatagccaggatcctgaacttgctgaaaagtaccacttgcgcgctggcgtcggtttagctgcaccccaagtagatgtttcaaaacaaatgtctgctgtcttggtccctggaccagacgaacccatcttcaaagatgtgattatcaaccctaaaattatcagccactctgttcaaaacgcagcacttgctgaaggtgaaggttgcttatcagttgaccgcgaagtgcccggctttgtgccccgccctgaccgtattacactacgttaccaagatttagacggtgaaagccacaagattcgcttaaaaaactacccagctattgtgtgccaacacgaaatcgatcatctaaatggcatcttgttcttcgatcacatcaacaagcaagacccattcgcagcaccagatgacatgattattattgaatagaagtgcgattggttgtgcttagcaactgagcattaatacagaaatggcagttatcccgaattgtgggataactgccaattttagattaaacgggagttgttgcacccaagcgcacgttaaagaagaagtgctgattcgagttggtcaggctttgaggcttaacggtaaaggctactcgagaagcacataaaaaagcgtgattgaaatctcattagaagatttcgatcatgctttttttatgcttccgccgcttcaggcgtatcggcaaattgactgttatataaattagcgtacacaccgccggcagctaatagcgaatcgtgcgtcccttgttcaacaatttgaccatggtccatcactaaaatcaaatccgcgtcgcgaatcgttgagagtcgatgggcaatgacgaaactcgttcgcccttgcatgactttttccatggctttttgcaataaaccttctaatcgggtatccaccgaactagttgcttcgtccaagattaaaatcttaggatccgcaatcacggctcgggcaatcgtcaatagttgtttttgcccaagcgaaacgttgcttgcttcttcatcaatcgtcatttgatagccgtttggcaacgtatggataaaatgatcgacattagcggttttagccgcatcaacgacttcatactctgtcgcatcgagtttcccgaaacgaatattatcggtgattgaagcatgatataaccaagcatcttgaagtaccatcccaaattgggaacggacttgttgcttgcttaattgcttcgtgtcaaccccatcaatccgaatcgttccagatgtcacatcataaaaacgcatcaacaagttaatcatcgttgtcttcccagcaccggttggcccgacaatcgccactttatcacctgggttagcagtaaagctcaaatggcgaatcaatggtttgtctgggttatagctgaaactgacatcatcaaattcaactttaccttgaacgattgctggcaacgatgctgtttcattatcggttgcttcaactggctcatctaagatttcaaatacacgaccagttgcagcagcagctgattgaatcacaccagacaactgtgtaatctgtgagattggttggttcacttgccaaatatattgaatgaaggcttgtaaattaccaactgaaatcacaccgtgcaagacataataaccacctaacgttgccatcccggcatacgtcatgtttgtcgttaaaccaactaacggcatcatcaagccagaaacaaagactgccttaaagccatagtcagttaaccgatccgtaatttctgcaaaagcagcaattgcgcgttcttcttgtccgtaaagtttcaagacactgaagccgccataattttcctgtacaaagccgttcatttcgcccaacgtgtcttgttggcctctaaagtacggctgcgatttctgaatgacccgtcttgaaatcaataacgatgctggaatcattattaatgataagagcgccatccaaatattaatcgtaatcatcatgatcacggccgtgatgatccctaagatcgatgtcacaacttgaattaaactctgttgtaaagcgttcgtaatcgcgtccacatcgttggttacccgtgacaagatattcccttgttgttgtgaatcaaaaaaacgaacgggtagcgcattgatttgcaaatcaatgtcgcgccgtaaatcacgcatcgcccgttgaacagcccgcgtcatccaaaacgagcctaaaaacatcgtcacttgatatagcaacgcaaagctcaaaatcatcgcaatcaccttcgcgatataactaaaattaatcgcaacgtgttgtgctaaactccgactgatttcagtaatggctagtcccatgatcactggccacagtgcattagcgagcaccgaaataacagttgcggtaatcgcaagccaaaatgtcacttgatacggcccaatgtagcgcattagccgtttaagttctctaatattcttcattgagttcctcctgtgataactgtgatgccgcaatcgcacgataaatctcgttatcttttaataagtcgcggtgagtcccaataccaaccacttgaccttcgtttaagacgacaatccgatcagcattcatgatagtcccaactcgttgtgccacaatcagcactgttgcctctttggtgattgacttcaatgcacctcgtaacgccgcatccgttttataatccaatgctgaaaaactatcatcaaagatataaagcgcggggcggcggacaatcgctctggcaatcgccaaacgttgcttttgaccaccagataaattgctcccaccttcggctaaataagtttgtaagccgtctggtttttcagcgacaaaggtatctgattgtgcaattttcaaagctgtccataattcttcatcagtcgcattcggattaccataacgcaagttttccgcgattgttccggtaaataacaccgctttttgtggaataaaaccgatcttttggcgcaacgccttaagttgatagtcgcgcacatcatgaccgtcaagcttaatcgatccacgtgttacgtcaaaaaagcgtggaatcaattgaatcaacgttgacttaccactcccggtactcccaataaaggcaaccgtttcacccggatgcgcttggaacgtgacatcccgaacgactggactttcagtcggacctggataagcaaaggagacattatcaaacaccaattcaccttgtgtgtcggttgttgttaccccgtcttctttttcggtaatattaattggcgcattcagaattttttcaattcgttctgctgaaacagcggcccgtggatacatcatgaagacactggcaaataacataaatgaaaacagtacgtggaaaatatattcaataaacgcaatcaacgtcccaaccgctaagtgaccaccatcaatctgaacagccccttgccaaatgattagaacgaatacgatattaaagatgaacgaaaagcccggttgtgctaaagccaccaacgtaaacagccggatagaactatgactgtagtcatcattcacttttctaaagcgtaatttctggaattgttcccgcacaaaagcacggacaacacgaatcccagtcaagttctcacgcagattcagattaatcgcatccagatttttttgttgttccgtcgacatcggttcagaaacgcgaccaatcaagacaacccccgttagcaggattggaattgccgcaaatacaatccatgagagcgattgacttgtccgtacaatcatgaaagcactcgcgacgatcatcatcggggtcataaaccctgtccgcaacacttgggtcataaattgcatcacctggaaagcatcattagtggtccgagtaatcaaagaagacacaccaaattcgccatactcactatgggaaaactgcatggtttgtttaaaaatatcgttacgaatgtcacggacgatattggtggttaatttgctaccagtataagccaagccaattaagccaattagtccgattaaacagattccaaccatcaataacccaaattgccacacaggaccaaaggtatgttgattaattcctttatcaataatttgtcctaataacgttggtaatcccaattcgattagaataaatccaaatacgcaaataaagttccaaaatagtaatttcttatatcggatcgtatagcgccacattaatttcatcggtgcaaactccttctagacttcaaatttaatcttctacctgtgccatatctttaacatactcgattgtttcgcgattgacaataaaagcaacgtcaaaatgcaattgttcttccaaaaaccacacatcagtgactagcaaagccggataacgcggactgacggaggcaatccgccgttcgtaagccacttcattgagttgttcctcaattgcggctgccacatcctttagtgcagacgatgtttgtcggatgggcacttggtactcgaagaccatcacattattgccccaaatttcagtgggcaggttcgaaaccagtttggcttgcggtgcataaaaatccggctgactcgcttgcattttttgataagccaccgttgcaatttcatccgcaatttcttgactactgtgttgtaaaatccgcgtcgctctttgtcggcgtaaccgtttaatcaaccaggttaaaaaaagcgctaacgcgacaatgataacgactgacaaccaaattaacataacaatcccccacttctattgctcactaatatgataattataaccgaatcgaggcaaacacgctatttagagcacgtcgctcaatgtatactttaccgaaaagatatgctaaaatattcttaaatgttgagtaatcaacccctggacggttaatctttcgtttaaaactatgatgaataataaaggagttttacaattgatttataaagtacttttccaagcagacaaaacccaaagccctctacgcgaggcaactaaatcgatctatttagaagcagacagtgccgttgaagcacgccaacttgttgaagacaatactccctacaatattgaatttgtacaagaattatctggtaagcaccttgcttttgaacaagaatcagaagattttaaattaacggagttttaattaaatgaaactcgatattaagaataacgaaaccgccgttttcgccgtagggggacttggtgaaatcggtaaaaatatgtatggtgttcaattccaagacgaaattattgtgattgatgccggcattaaattccccgaagatgaactcttagggatcgattatgttatttcagactatcaataccttcaaaagaaccaacaaaagatcaaagccctcgtcattacccatgggcatgaagatcacattggtggtttaccttacttcttgcaacaagtccctaatgtacccgtctacgctggtccattggcacttgccttgattcgcggtaagttagaagaacacggccttttgcggtcaacagaattacacgaactaaacgaagataccgtccttaaattccgcaaaacaagtgttgatttcttccggactacccattcaattcctgatactttaggggttgcgattcatacacctcaaggggtaatcgttgaaactggggatttcaagtttgacttgaccccggttggtaatcaaccttcccctaatcttcaaaaaatggcacgtttaggtgaagaaggcgttttatgtttaatgtctgatagtaccaatgccgaagtaccaaactttacaaagtcagaacgtttcgtcggcacttcaatccgccatattgtggaacgcattgaaggtcgcattattttcgcaacgtttgcttctaatatttcacgggtctcacaagccactgatgctgcgattgctaacggtcgtaaaattgccgtctttggtcgcagtatggaagcagcggttgtcaacggtcgtgaactcggttatttaaatattcccgatgaagctttagttgatgccaatgaattaaattcgttgcctgccgacaaagtgatgattctatgtacaggatctcaaggtgaaccaatggctgctctaagccggatcgccaatgggactcaccgtcaaatttcaattcaacctggcgacaccgttgttttctcaagcaatccaattcctgggaatacaatgagcgttaaccacgtgattaataagctttcagaagctggtgctgaagttattcacggtaaagtgaataacattcatacgtcaggtcacggtggtcaagaagaacaaaaattaatgctccggttaatcaaaccgaagtacttcatgccttgccatggtgaataccggatgcaaaaaatccatacggaactcgctcaacaatgtggtgtggaacctgataactgcttcatccttgaaaacggtgacgtcttagcactcacttctgactcagcacgggttgctggtcactttagcgccgaagacgtttacgttgatggcaacggaattggcgatattggcaatgtcgtgctccgcgatcgtaaaatgctctcagaagaaggtttggttgttgttgtggcaactatcaatcttggtgaaaagaacattctcgctggtccagatatcctctcccgtggtttcgtctacatgcgtgaatcaggtgaattgattagcgaagcccaacgccgagttttccgaatgatcgtcaatacgtttaacgctaacgacaaggtcactgaaaaccaagtccgcgaagcaatcattgatggcttacaagacttcttgtttgaaaaaacagaacgccgcccaatgattttaccaatgatcattcaaagtacagaataataagttttgcgccaggtcaatatatgacctggcgctttttttattgtttaatgcaagtttttattgtcaacatttggtaaaaaccgctataatatacaacagattactttttctgaaaggcggcttgtccatgccctccaatccccatttttacatcattttaaaccaagttgccggtaccggtcaggcagcgagtatctggcctaaaattgaaactcaattaaaacaaaaacaaattcactatgaccttcaactctcccactacgcaggtcacacgacccaattggccttccaatttgcaaagtttaagtacacggatcaaattttattaattattggtggagacggcacgctcaatcaagccattaatggtctccagaatgctcagcgcggcgatattccgattgcttacattccttgtggatcgggtaatgacttcgcccgtggtgtcgggattagtcgtgatccattgaccgcactcgaacaaatcttgtcggccacaatgccaactgccatcgatttaggttattatcatgacacaacgaagaacgaccatggctacttcgttaacaatgtggggattggttttgatgccaacgtggtcagcaccaccaatcattcaaatcataaacgacttttaaatcgattgcacttaggctcattagcttacatcagctcattggttaaagtttttatgcaccaagatgcatttgaagtcaccgtcacggctgatcaccaaaatcattattttaaacgtggctttttagtgaccaccactaaccatccctactttggcggaggggtccccatcatgcctagcgcaacggtcgacaaccatcaacttgatttaattgtgattgaaaaattgaatccctttttcttttgctatctttttgtgatgatgttgtttggtcggcacacacgctatcaagcggtgcatcactttgaaggaaccaacttagcgattcaaacaaaaacattagaattcgggcaaatggacggtgaagaacttggtagccggacatttgatattcactacagtcttaaaagccaggcattttggctaaagaagcaagcataaataaaaggcgctgcctccaagttgggggcagcgccttttaacgtgctcttcaaatcatgttcctgtgcctagcaacacaagtcaaccgattgctttcagcaatcattcgcattgttaggctagtgctcaaaagttggccaaacttgaatgcactcatttctttagaagtaatccgagaagtatggttggtccattggaataatattctcgagattttttagtgcttgtcggttggcttggagtctttcaatctttgccaagtatgatgggcgtcgatagctcatcagcattgttgttagtgtctggatgtcgcattgaattcgttcaccgactgggcgacttgtgacctgcacttttccttgttcatcccaataaacgccaaacgtaccgttattccattcagctaatggatcggtcaattcaatgtggaatgcttgcccgtccgtttcaaacggataagccaacaagaattcacgcacatcaacaatccgcgccataaaatatggcttaatcgtctggtcaatatcaccatcttctaataagaatgaaatcggttcatcctgatattgattacccttgacatgttcaatcattgaataatgcgcgccaatgaagttccacagaccaatccgggcttcttgattaagataaatcatttctttaatatggaagacttcgttggcaatccagtataaaacatagccggtgggttgttcattttcatcataataaacaccagcaatccgttcttcttcattttcccaacgccaatattcatcccagttcagttcgttacgaatcattgcaccgtgattttttagtgcaaaccgttgatacgttttaatcacgtcttcatcgtcaatatcaaggcgttcaacgtgcccatttaccggccgttgcttaggtaattggctatcacgaatatcataagttaggtgatcagacatgatctcccaccctttcttacgataaaacggaatgctgtatggatataaatacgatatccactgcttattctcacgcatcttgttcaagccgactttaaccaagtcatgcatcaaaccatgaccggcatattccgggtaagtcccgacaccagtcaaaccacccatgttaaatacctggccatgaatgttcacgcggcaatgatagatggctaattgtgaaatcagttcgtccccattaaaccatccgattacgtcagatttttctaatacgggacgtttggcgcgttctaattcgccctcttcgtagccactatcagaaacttcctgatcggtgacttgaaaaacataccgtaataagtcattaaattgttctaaatgttcaattgtcacgggtctaatctctaaattagatcgctggtcaaccattgtttcgcctcatttttcgttagttgttttccctattatacactattttgatttcggcataaaatcgtacggtgtcaccccggtcatcccaatcattggatccacttgctgttgcgttagaacagtcggtgttaagacataactgattggcgtttcttgtattgcgtcgtcgtcttctggcactaagttcagttgttcatcaacagccgtttctggcgcacttggtggtgccggctggtcaacaattgttttggcttctgtctgccccacactggccgtcttaatggcggtgctgagttgttcaccgttaaagacactttgaatccgttcttttaacgtcgtttgccgattggccgaaagttcctgagctgctttttggaaagcactcggttcaccaatcagaatcaacaatgatttagcccgcgtgactgctgtgtacagtaagtttcgcttgagcattcgttggtattgattgaccaatggtagaatcaccatttcaaattcagaaccttgcgccttatgaatcgacgtacagtaagccaatgtaatcttgtgccactcactccgcttataggtcacttctgcactatcaaaagcaatggtgatctcgtcaaccttgtccgcactctttttagcataggtaatccccgtaatctgcccgatttcaccattaaacacattttgttccggactattgaccagatggagtactttatcgccaatgcggtagtgaacgttaccaatgctaacttgttttttgcggtcatctagctttggattcatgatattttgaatcatcgggtttaactgatcaattccggctgctcctttgtacatcggcgctagcacttgaatgtccttggtttcaaaaccacgcgctttggccttagtaacgacttgttcaatcaccgattcaatttgatacggattacattgaatgaaactgcggtctttttgcggcttcaacaaatccgctggcagttggccttgattaatttcatgcgccaacggaataatcgttgactggtcatcttgccgataaatacgttgtaattcaaccgctggaataaccttactctgcaataaatcaaagaaaacttgccctgccccgacggatggtaattgatccttatccccaaccaatacaacctgcatatgactgggcaccgcccgtagtaatgagcgaaacaagtaagtatcgaccatcgacatttcatcaataatcaataggccgccttccaattctttgttaccggaaacatctggattattttcgcggccagtgattccgagtaagcgatgaattgtactagcaggcaaacccgttgtttcactcattcgttttgcggcccgacctgttggagcggccaataaaatcggaaacggcgtgtctttgtactcattaatatctaatgacagcccgtttaattcagcgtataacgtcacgattccgttaataatcgtcgttttcccagtaccaggtcctccggttaataagaacgcccggtgagtcatcgcaagtttaatcgcctcttgttgtacgtcatcgtatgtcatcttaaaccgtttttcgaggtggcgaatttcttgatctagatcatgtttaggatagctaagttgatcgcgttcattttcaattcgcattaaatggttcgcaatttgccactccgcattaaataacccattcggataaatccgattctcatcaccaacgactttcccatcatgtgcaagtgccatcagttgttcagccaccaagttcggatcaatggcaacattgcgtgctttttccatcaactcaatactagctgccaataacggcttggcctgggtataggtatccccagcttgattggtcaactcatttaacgcttgcattaaagccccttgcacccgcacggctgaatcagcggcaaacccgagggtctccgctaaattatctgcacgtttaaagccaatcccagcaatgtcagccacgagttggtacggattttcttggataatcttcagcgtatcttcatggtaggtctgatagatgttataggccatcgagctcccaaaaccatagttgtttaagccaataataatctgttccatcccattattaatcgtcagcgtttcaacgagttgtgcttgtttcttcgcatttagccccaatggttctaacgccgtcggatcctctaatattttatcaatcgcgtcaattccaagagtatccacgattttttcggccgttttctgcccaatgcctgtgaatttttcgccagacaaataagcgactaagccggccttagtcgttggttggtccacttggtaattatcggcttgaaactgtttgccatatttaggatgagtgaccactttgccatagaaggtatatcgttcatcttctttaatgtcgccaaaactcccggtcaccacaatttctgtttcgtgccagtcaatcgtcttatgtgctactttaacgagtagaattttaaaaaaattatccgggctctcatagaaaatactctggacggttccggtgactgttggtttggtttcgtctgtttttgctatatccacaatcgccatcccttattctttttgctctttagcctgcatgaagccttcaatatcaattaactgttgtttattctttttaaaataatccggtgcatagtgcttggcttgttcgaaataaggctcactatcagcgcctaagaccagttgcgtcaagccatacttaaataatacttcaccattttgaggtgcaatggtcaatgcctttttaaggtaggtctgcgcttggtcaaaatcacccaagctcgttaaaatatcgcccactaaaagattggcgtctagttggtctggttcttgttcttgaacggtcaacgcgaacgccaatgcccgtggattctgttcgagttgatgatatgtctgcgcaagcatatactgcgcatctgttgattgtgagtcttgcaccaactgcatgaacaagggcaccgcttgttgataagcttccgcttgataatagagtgttcctaatgcgtaagtcaatgcagcttcattaggaaattgcgtcaacgctttttgcaaaagtgcttcagcttgttcaaaatctttaagcgtcgttaaaaatgtcgcaagggtaacgtaagcttcaatgtcttctgagtgatcttgtaaatattgtacgagatctttaacagcggcttcgtggtcgccagcggcccattttgctagaattgcttgcacgtgatcatctcctatatcgtatctgttgcggataattgcttgctgaggaagtgtgtatcattccacttaattagtttgaaagatgctccttgatcgtcagttgtcatcgtggtcacagatgaatttgtcacaccgccgtctttgcggacctgagccaatggcgtcttgagtaaggactgcatcatcgccaccatcgctgccccatggctgacaataataatatgatcagccggtttagcggccttcacaattgcgtcaattgcctgcgtcgtccgttcaatcacttgttcaaaggtttcccctttaatttcagttggatcatactccgctggtgcttcacgaaaggctttcacgattgtcggatattgtttttcgacttccgtaaagcgcattccttccattagaccgagattaaattcgtggagtgcatcaacaaccgtaatcggaaaatcctgccctaagtctcgttttagcgccgcagacgttacctgtgtgcgttttaacggactcgtatataaatgatcaaaatgaatgggctttaaaaatgtggctaattcttcaatttcaacgtaactactgtctaataatggtgaatcaccgcgtgcaccttgatagcggccctccaaattccattcagtcttaccgtggcggataaaatataaggttgtcatgcgttctctccttaaaataacttacttttcattatgaaagagttacgccctaaattcaagtcaatcgactaataaagcaagcatttttcctgtaaaacgccatcaaaaaaaccgctaggataaaaatactttttatcctagcggtttcatctattagttgctctaaacgtgtttcagtaggcatatttctgcggttaaccctatttgccaaattcagttaatcctcaaaatatgaacgcttacttacacactcttttatttactttctgcgacagcttgcattgcaattgcgttgacgtagttgactggttgatcgtagtttggttggaagaacatgtcaaccattgctaattgatcaatcgtcatcttcgtttgaatggccattgaaatgacgttcgctgcttgagcaatatcatacatacttgtgaatgaaccacccaatacttgacgcgtcttaggatcccacattaagttcatcaaaaccggtgtcgttgatggcatgaaatcagggcggtaatcttgttctaacgttgttgtagcgacttcaatcccacgcactttcgcgccttcaactgttaggccactccctgaataggtgcgaccaaataattcaacggcagaagttgcttgcgtgcccatgtacttttcagttggtgtttcgatgttgcggccgattaaaaggccttggcgaacagcgttggttgccaatggaatgtaatctgctttttgcgttggattgtaatgaacagctgctgaatcgccggctgcataaacatccttaacagacgtttgcatgtattcatccgtcaaaatcgcaccgttacctaacatatcaacttgccctttgaaaaggccagtatttgggcggaagccaacacataaaattgcaatgtcggctgtgtattcgttcttatcagttttaacagtgacttgatccgtccctgagaaactgaccactttttcgctaagcgcgagggttacaccgtggtcacggtaatcttgttccacgatttctgagatattagggtcgaaattcttgccgagtgcgtgtggtaatgcatcgattaatgttacttgcttatcagttgttgcataggcttctgctaattcggcaccgatgtaacctgaaccaatcacgataacactcttcacatctggggcgctcttcttcaattcattggcatgcgcccagtttttgcagagcttaacgttcggattgtcgatgccttcaattggtggaatcacaggtgatgagcccgttgtgatgatgattttatcgaatttttcggttgtttcttcttccgttactaagttcttaacgcgtaatattttttgatctaagtcagcttctaaaacagtgtgttgcatcttcatgtgagcgcctgcttgcgctaacatttctggatttgaatagaacattttctgaggatcggctacatggccgcccacccaaagggcaatcccgcatgataagaatgataaattatcgtgtgtttcataaaccgttacatcccaatcaggatgttctgccaatgttgcttgtgttgcaaatgtccctgcgtgtgtacaaccaataactgctactttcatcatgttacctcctagaaatatccaaaaaacgacggttaatcgttgagaatttgtgaaatattacgcaaccagcatgtaactatattgtacgctacttagtttcgaaaagtcaattgcctccagctattaaattaatttcacaatctaaaacgaataaccacttatgttttaaacgttatattgtgattttattctaaaaaaggtcgttgaccacttattgaacaaacccacaaaaaaagtgctgataaatataaattcatcagcacttttaacgattaaattagatatattgtaatactttcatgtcagcatcatcgttcgcagccttataagccacgtcaatcgtgccgccacctaaacattctgcgccgtcataaaagacaaccgcttgaccaggagtaatcgcacgcactggatcatcaaagacaaccgttgcagttgtgtcagatgtcatgtggacggttacgccgacgtcttgttgacggtaacggaacttagccgtcacgtggaaatctgtcccatgatcaactggtgtgatccaagaaatattacttgcatctaattgatcagcatagagtaattcattatggtagccttgaccaacatataaaatgtttttgtctaaatctttaccaacaacgaaccatggatcattggattcgccaccgccaccgattccaagaccggagcgttgaccaatcgtgtagtacattagaccgtcatgggtgcctttttcaagaccgtcgaccgtcatcatcttaccgggttgtgctggtaagtattcgcctaagaattgcttgaagttccgttcaccgatgaaacaaatcccggttgagtccttcttcttagcagttgctaagccagcctcttcagctaaccgacgcacttctgctttttgcatgtgaccgattgggaacattgatttttgtaattgatcttgagaaagagcgctcaagaaataagtttgatctttattgctatcaccgccacgcaacatgtgcgcgatgccgttatcatcgcgttcaatctgagcatagtggcccattgcgatgaagtcagcgtctaattccattgcgtaatctaagaaagccttgaatttcacttctttgttacacatgacgtctggattaggcgttctgccgtgtttgtattcgtctaagaaatattcgaacacgcggtcccaatattctttttcgaagttgacggaataataaggaatgccaattttagaagcaaccttggcaacatcctcataatcttccgttgcggtacagacaccattttcatctgtatcgtcccaatttttcatgaaaacaccaatcacatcgtatccttgttgctttaacaacaatgctgtgacagatgaatccaccccgccgctcataccaacgacgactcgtgtattactgtggtcaaccacaatatcaccatcatttcaaatagattctagttttctacgatttgaaggtcgtgaattccagtacttaccattatagcaatcttggttaatatttcaaactaaaacactcacttttcataagttaaacgtaaaaaagcagtttacctatcaaactcctggtaaaccgctcttaaaacgttatttagccttctttaattaacacttcacgtgccactaagttagcaataataaaattaaattgttcgacgttttcagcattcttttcactcttgaaaatatcgactggatgtaagccatctggagaggtgacagacatcttcaacgtctgtaactctttaccaattgtcatcttcaacttaatcgcactgttaaatggtgaattaggatctaatggccgttccatctggaagttaccattgtttgtgggcacaaagccaacatctcttaatgtgtattttttaacggcgggattgagtcgatattgcaccgtactccccaaaaccgttgctgttgtttttaataaagccatctgcctaacctccatacactgaataagtctattttagcacaagcacgtaaacgctgcctaccccttagcggcttgctttgctaaattgcgtttcacaatcttcgtgagcgcttcggcaaaagcagcgacgtcttcgctcgatgtttcgtgaccaaaactaatccggatgctttcggcaacgcgcgggctatcctcaccatacatcgcgatcaacacgtgtgagggttccaaatcgccagcagtacatgccgaaccacctgaaattgcaaagcctgctaaatcaagattcatctgcaagacataggttgaaacacctttaatccagaggttcacaacatgcccgacttgatcagctccttctgcgttcagcgcaaaatcaatgtcgttggcttttaaatcagctagtaattgctgtttgaatccagcataccgtgcttgtaggtctgctttaaccgctggggccaataattcaactgctttcgcaaaaccagctacagcgggcacattttcagtccctgcgcggcgcttcttttcttgttcaccacctaggacaaatgatggtaaatgaatcgcgtcgttgacatagagaaagccgatttgcttaggtccattgatcttgtgggctgaaactgccagtaaatcgatattgtcagcttgcacatcgatatctaataagccatacgtttgcgtagcatctgtgtggaaccaggcgtttgagtcgcggacaagttcaccaatttcgtgaattggcatatgactgccgacttcgttattgcccatcataatcgatactagaatcgtttcgggcgttaaagccgccttcaaatctgcgagatcaatcaccccttgttcgttgacgggtaagtaaatcacatcaaacccttgcgtttctaaataggccatcggttttaaaacggaatgatgttcaattgccgttgtaataatccgcttgccttctttagcacgcagtctggctgtctgaaggattgccgtgttattactttcggttgccccactcgttaagataagctcgttatctttcgcatgaatgctctgtgccaaagtatggcggctggtatccaacaccgtgtgggcttggcgcccaaaataatgggtgctcgatgcattcccgaaatcggcctgcatctgttcggtcatcgtcgcaatgacctctggggccatgggtgtcgttgccgcgttatctaaataaatatgtttcacaatttttcgcctcattttaaaaagtatctataatagtttaacatagttcgcttttaaagcacggataaacacttttcgctaccaaaaaaggctgggacaaagataccttgtcccagcctttaaaacacttaatctcagattaagcagtcattaaagctgctttttgatctgctgttaatgattcattcatccggccactcttgaaaccagctaaatcaaccgttacaaattcaaaaccagcttgttgtaatgcttggttgatttgttcgctgtgggttaagaagtcagcaatttgtgcttctgggacttcaacccgggcgattgattcgtggtaacgaacacgaaccgttgcaaaacctaaatcacgcaagaatttttcagattgcatcacttgagcaattttggcttcagttaaggctgtgttatatggaaagcgtgaagaaactgaacagctcgctactttattccagttatttaagtttaatgcctttgctaattgacggacatcaatcttataaaaaccagctgtttgaaggacactttctgcgccagcttcgtcacgggcccgtaaacctggacggaagtcgctgttatcatccatgatcatcccatctaaaacgtggtcaaagcctttttcagcagcaatttggttcaattgtgtatagaacatcttcttgctgtaataccatgtttctggtgtgttgttggcaatgtgttcgtcagataagtagttcaatgttgttgtttcgacattcgcgcccatatcatgtgccaagtcgatggctttgttaaattcttcgtctgtgaataattctgagttagcaacgactgctaagacgttttctttgccgagtgtttctaaagccatttttaaaactaatgtgctatcaatcccaccagaaaaggcaacaatcactttttccatttgttgtaaactgacagttaacattgcttttttttcagataatgtattcattgttaaagacttctttctatatcattagattaattgttttaaagctgttaattcattttgaatccgatcggcatacaccaaatcgttgttatctaaactcttgacgatcatcaagtttaaatgcgcggcactatcaacaaagtttttgaaagttgattgactagcggtttgttgcgcgtcatcaaggctaccataaagttgttctgctgttaaaagcgcttgttgcgcttcaattaaactggttgagattgtccccggttgtgaggcatgagcagcgacttcgaataagtcgaccatcatgttttgcgtttgtttaatttgttcacgcatggttgattcctccgattaaattagatgccaaagaaactccgcataaagagtgcggcacatagaccaccaacaaatggtgcaattccgggcacgataatcccgtattgccaatctgagttggctttatttttaattggtaaaagcgcgtgagcaattctaggacccatatcacgcgcaaggttcattgcgaatccggtaggaccgcccatccccatcccaattgcccaaacaagtaacccaactgcgattggtgcaatcccaggtgtcttgatttgtgtaatggcgataattgatgaaatgaaaacaaatgttgcgaaaaattcaacgaagaagttccgtggtaaattccggataccaggtgctgttgagaagatgttacgaaccgcaacaggatcgacattgccttctgatgctttaaattcatcagcgtacatgatatagacgataactgcaccgacaaccccgcccaagacttcagcaactgagtaagggataaacattgcccatgaaacgttgcctaagatacattgtgctaacaccatggctgggttaattgaaacatctccgaaaatgaataatgaaactgtaatcccaaacccccatgttgtaatggcaaataaatgacctgagccacgatactttgaacctttgaggacttcatcactgtgaaccccaaccccgaaaatgatcatgagcgctgtgcccatgaattctgctaataactgatgaatcatgaataaattcctccaaataataacgatttaatatctaaattttgatagctttaacgcgttacatcaggatagacccgactcgggcatactctgataaacagcaagataaacttgattaagtgccacgtcatgcgccttggcggcagctagacaatcgtcgaactctggactatatttttcgagatcgtcatagttcacgattttgacccgaatatcgccgaagcgcgtggctacagtgataaaatgacgtggcataatggtgcgccccatcgtctggtaacgcacaccaacagttgctgtgtgttttaagatcagataagtcatggcttgttgatcggctggatgaatcatgaccgttagcttaattgcgggccgatttttcttcatttgaattggactgaaaaaggcatcgagcgccccattgtccatcaataaatccaaaaccggcgctaaactttctgctgactggtcatcaatgttggcctccaacactaaaatctgatcggtatcggttttaacaacctgttggcttagttttttttttcgcacaacatcacgcgtaatgcattgagttgcggtgtttcccgattaccaaaaccatagccgactttaatgatcgtttgatcgtctgggattggacagaattggtcgacaatcgttttgacaatccccatcccagttggcgtgatcaattcggtctgcaagtctgggttttgtttaattggaatcgcactaccgacgcgcatttgcatcacagcggggactggtacgggcatcatgccatgcgcgactttgataaagccactcccatccgttaattcggatgaatagacttgattaactgccaataattcgagggcgacaaacgctccaacaatatcgacgattgaatcaagcgccccaacttcatgaaaatgaacatcacttgatggtaggtcatgaacgaccgcttctgattgcgcaatttctgtaaaaacttgtttggcgttcgttttaacataatcgcttaaatcactgtgatcgatgatggcttcaatgtcttttaaatgtcggacgtcatcaccatggctgtgcgtgtgtccatttgcgtgttgatgcgtgtgtgcatggccagttgcgtgtgtatgcggatgttgatgctgtgccggtgttgtttcaataaaaccttcatccttgtgcatggcttctggcaaatggacgtcaaaatcggtgccataaatactacttttagcaatccgttctgcatgtaggtggtagccagggacattcaacttagctaattctgtttcaaactgtttgaaatcaacccctaaatcgagcaaagcgccgatgaacatgtccccactaattcctgaaaatgcgtctaaataaagagttctcatttgtcatcctccgtgtcacttaaatgattgatcatacttgctgagtagcccgcaccaaagccgttatcgacattgacgacggtaatcccggacgcacaactattgagcatggtcatcagcgctgttagtccaccaaagttagtgccatagccaatactggttggcacggcaatcaaaggtttttcgatcaacccaccaaccacactggctaaggccccttccataccggcgaccacgatgacaacttgggcttggcgaatttcatccaaatgttcaaacaagcgatgaatgcccgccacaccaacatcatagattcgtttaacttgattaccgtatacttctgcagtgaccgccgcttcttcggccactgccatgtcggaagtccccgctgtgacaacggcgatatagtgatccgtggttggtagtgggtcaaccatcagcactacacattgcgccatttcatagtacattgctgtcggttccgcttcttgaatcgcagcgtacttttctggggaaactcgcgtacataaaatattttcggcatgtcgttttaacgaaccaatgatgccaatgatttggtccgccgttttaccggcgccataaatcacttccggatagccattgcgcttttgccgacttaagtcaaccttggcaaagcctaaatcatcaatggtctgcgcatgtgccagttgctttgttgcttctgtcacactgactttttggtttgcaacagcttctaaaagctgttgtagctcatttgttgtgtccaaactactcattctttctattgttatttcacaataacccctaaaccatcagggatcactgtcactttggcatctgccccttcaatctcgtaggcccgttctaacgctgcatctaaactggttgccaattccatatgcatgtctgtaattaattgtggatcaaccaaatctgacacgaaaatcacatgatgttggaccagaatccgagccaagatttgtgatgtccattgatcagggaccgtttcaagccgtggtgtattgattgcttggtctaagaattctttaggatccttaacgtcagcaatattgtgatagaacccatcaccaccatgcccgtcacgtgcaccagcgaccatgataatcacgccaccttgtttgttcgtcgcttcagcagcagtcatccctttaacggcttggtaaatattttgatcaagtggatagccaccatttgttgaaatggcgatatcacaatcgatcttgtcgacttctgataaactttcaacgaagtcacagccttttttgtgcgctgtttctaaattaccggcgaatgaaccaatgatgtgcttgtcttcatctaaaacaacgttcaagatgaattcaagcccagcttgtttagcggcataaaccatatctttgtggactgggttatgcattaaattcccggttcttgaatagtgggaattgatgaattcacctgagtggttggccataattgttttgtatgaagccacacccggtaaaacagacttccgcccgcctgagaaaccagcgaagaaatgggattcaatgaagccttcagaaatcaataagtcagcttcaacagcgactttattgataatgcaatcgccacctgatggcaattgaccgattttcacaactgagctgtcatcggttgaaacatgcatgacgatttcttcatttgcaacgatttcttcaccatatttgttaaccaattcttcgtgcgttgatggtcgatggaacccagtcgcaactaaaatccgaatccgtgcatctggtgctacagaacgaatccgtcttagtaaaatcggcgtgatgatatgtgaaggaactggtcgtgtatgatcagaactgataatcacgatattctttttccctttagccaactcttctaacttagggctatcaatgggattgtccaatgatttttcaaccgtttcggcttcgctcattggattttgatacgtagcagcttgtgaaacaagcttcccggcaaaattcgcgtctgcaatattagccgtgataattttttgatcgtaaggtaatttaatggctaccaaactataggacttcccttctcaatgctgattgaatgcttttttaaagctacgtccatagttatacagattttctgaaaaggatgcggtataatttatgaacaacatttcattattacttttaggtgtaacaaatgataacaactttatagtcttcaagacgtataatttagattaaagttatttaatgattagcagatataataaatcagcacaaagggtaggcagatgtattatggttttaacagacattgaatttttaattaactttttagaggaacgtcacgtcccagtgattaccaaaaagaagcacacatacttgacgtaccacggtttggaagaacggtatacttatattctgaaaaaaggcgtgattaaaaactcgatcattttacaagacggtcgtgaattcaatctctcttacattacccagccggatgtcatttcacttttacgggatgaaatttcaaaatatacggatcaaccgtttaacgttcgcgttgaaacagaggaagcaactttctatcagattgaccgcgtgaccttctggaactacgtgaatgccacccccgagttacagaattacgttaaaaattactatcgtaaaaaattatccgagaatatttatcgcttgcaaaaaatggtaatgaatggtaaaaacggcgggctgtgtgccttcttatacagcttaattgatctctttggtaagaaacgccgcgatggcatcctgattgacttcgtcgttactaacgaagacattgccggcttctgcggaattagctcgcgcagtagtgtcaatcgcatgctcaaccaactcaaaaaagacggcgtgattgaaaccaccgagcataaattcttaatcaaagatgtcagttacttgcttgataatatcgccaattagcgatttgttaacatatgtaaacatgattcgtgattgaaaacggctatgagacgcgtagccttaatagtcgagaacaaatcagtggaggtttttatgtatgcatattccagataattatttaagtccccaaacgtgtgccgtgcttgcagcggccgctattccagtcattggcttggcactcaagaaagttaaataccaagtcaccgaaaaaaaagaaacggtccccatgttagggatttccgcttcactatcgtttctgatgatgatgtttaacgtgccaattcctggcggtacaaccgcccatgctgttggtgcaaccctattagcgattctcattgggccgtacgccgctagtctagcggtaacgattgcactcatcatgcaggcctttttatttggtgatggtgggattctcgcactcggtgccaatattttcaacatggccattatcatgccatttgtcggctatggtctctatcgactattccaaaaagcacaccagcccaaagtgggagtcgtagttggcgcatatctcgggattaatgccgctgcattaatggccggtattgaacttggtctgcaaccactcgttgcgcataacgcagctggccaacccatgtatgccccttatccgttacacattgcaattccagccatgttgttcgctcatttattagtcgctggttgggttgaagccggctttaccctcgccgtttatcaattcatttgccgggttgcacctaacgaactgttcgttgcaccacgtcaaacagttgatccacaaaccagccgtcgcttacatcacgcgctttacagtttcatcggcctattgactatcttatcgccgattggcctattagctagtggtactgcttggggcgaatggagcgcaagcgaactcgttgcacaactcaaacatgatcacctaggtcacagtctaccaagtggtatggcccatggcttaaactttaatgccctctttagtgactacacagttgctggcgttccactatcacttggctacatcttatcagcggtaacagccgtcattgttttttatcttatcggaaaactggtgatgaatcattattcaacccaatcctaaattaccaacttggcttcaaacaacggaagctacgcccaaaacggtcgcgcaattcgaccgttttttaattcaaaatttgcgctttagtgatcgtttgctgcggcgctttaatcaaacaaaacctcaacctttaatcgcccatcaaacgcctggtattcaactgattagtttattggtgacactcatcattctcgtgttaacccatagtctacttttaatttggttgattggtttattgacgttaattcgaatttgccgcttaccaagccagcatttatggccgctttttaaacgcgtcggtgatatcagtatcattgcgattttattaattctaccgaatttttggctcggccaagtcgccacaacgcttttatttatcgtacggactgaaatcatgttattaaatattgctttctttctcgagacgatcacttggcccgcttttattgttgctttacgtcaattaagactccccagtctgctcattttgacactcgaaattagtctgaaatacagccacttgctcgcccaatttttacaagaatccctctgggcaattcggctacgctcaactggtaaaagccaccaacggcaaaatttagtcggttcactgattggccgcctctacttaagttcccgcaactacattaccgctttatacgatgcgatgattctccggggctacaccggacaagtcacccgacggacgccgctaacagtgaatcgctacgactggcgcttaatcagctgggatctagggctattttgcctattctgtttcattcggaggtaatcagatgctgaatttgcaacacattcactacgcctatacgcaaaccgacagccttaacgacatctcactaaccattcaagtaggcgaggccgtcgcgtttatggggcctaatggttccggaaaatcgacgctgtttaaattaattaacggtttgattcagcccagcgcaggccaatattattttaaagaccaacttgtcgatgcccgcttcctcaaaaagcctgcacaggcgactgccctccaccgcgcaatcggctttgtgttccaaaatagtgacgttcaattatttaacgaaacggtgcgcgccgaactcgcttttggtccagaacagatgggcttagccccagatgaagtgcaaacccgcgttgacgattgcctcgcgttgttacaaatcgaacacttagctgatcgcgtcccttatcagctttccggtggcgaaaaaaaactcgtcgctttgggcagtgtgctaacgatgaatcctgaaataattgtgctcgatgaaccattcaacggcctatcagccgcctaccaaacgctgattatccacttgctccaacaactcaatcaagccggaaaagggattttaattgcaagccacaacctggctcaagtcaaacaagtcgctaaacgggtggtcgtctttaatgaagaccatcaagtgacccatgacttaccactcgcaaaacttgaacaagaaccggaactacaacgaactttagcattactctaaagagagtgtgttgtagttactgttaatcgcagacatataactgatagcacaaatatgcggatatcaaaagcggcggatgacacaaaaataatttttgtgtcatccgccgcttttgcattttatattaatcgccttcgatttgtaactatccctctgtcgcattgaccgtgattgactgtccaatcgggaagtagttcattgctgttataaccaccagtcaccgctaaaatcgctttgacattgtcatctatgaaagcagcgtgcaaatcggcaatccgcgcttcaattggactagaattgaattggtccattaccaagacatgctgcccaaacgtcacctgataaccaagtgcactcaatcgatcattcgccggttgattagccacatatccgccaacactttgcaaactattactaggcgcgatgacccgaatctcatcaccttctgacaatcgtgtaggaatcatcttaattcacgcctctccgttaccacttcaaaacgctcacataaacaggcaattgtcggcgtaaacacctgccctgcctctgcatattcagctttaaaaaatggctcgtgaactgaacgccaataagcaagcgttcgatcactctcgccctctaaaaaggcatgttcagcgtcgacttgatcatacttaacaatcgtgcacattatcgttttcgtaattgcaaccggccggtctcgtccatctaaaataacattataatcccccacttgtgggacatgctcatcgggttcatacaacttaatcgcagaagtggtggccgttttttgaccgattattaccaatcgtgccaattcattggccatttgttctgtattcccaaatgaataaatctccgctggttgtaaattaggtgataactgttgctgttccgtgaattgttgccaataccgctgcacctctggtgtcattgacatcccctcttccattcgtaacgttgttgttagtttagcagaatttaaccatttaaccaaaaaaagaaacttacccattaggataagtttcttttgatattttatgcccaccgacgcatctttttaagcatcatcggatagcttttaattaggaaccattgtttcatcttaccggttgtttggtcggcacgaatcccagcaatccctttttcaagcatctgttcaaaagtgattgttggttctgtccactgaccatcaacgtaacacagttggcaatactgatttgacttggtgccatcttgttcactaccttggttttgtgcagtcagtggcatgccacaactttgacagaatttttccatgttggactcctttaacgtgcttttcaaaccatgttcctacgtttagcctaattagccaaacaatcggcttcgccgcttattcgtctaattttgctaatcctcagaacataaccagtttgaacacacttattttcttaacgtgctttcatcaacagtttcctgcgctttgctacacttatcaaatcatcgactatgtcgctaattcgttaagttatgcaaatgctcagaagctaaccgttgatgacgcacttcttttatttaacgtgcttttcaaaccatatgcctgtgcctagcgacacaagtcaaacgattgcttgcagcaatcattcgccttgttgggctagtgctcggaatatacccggtttgaacgcacttcttctttaacgagcttgaacgcactcattttatttaatattcttcaagaagttaagcaacattgctgctgatttttggcctgcttctacgatgaattcgtcaaacgttacgccggcttcttcgtcgccgacgtcgctcattgcgcgaatgacaacgaatggaatcttgaattgcgttgcgacttgaccaattgcagcgccttccatttcacaagagagcgcttcggggtaaatttctttgattgccttgattttatcttggctcgcaacaaattgatcaccggtgacaattaaaccaacacgtggttgtaggtcaaccgctttagcagccgcttcgatttgttgaacaatcttagcatcactttcaaatcgttggggttgttgtggtaattgacctggtaagtaaccaaaggcagttgcttctgcatcgtgataagcgacttcgcttgaaatcacgacgtcgccgacatgaaggccttcaccaatcccaccagctgaaccggtattaatcacaacatctggtttttcttcggctaataaaatcgccgtcgtcatcccagcttgcactttaccaattcctgattcaaccaacgtcactttatgaccgtacaattgacctttataaaaggtattgccagcaaccgtgtgttgttgcacatcttctaactttgttaaaagcgtccgaatttcttcttccatggcgcaaatgacactaattttcatactaactctctccattctaaaaaaacattaactttaccattctataggaaaaaaagaatcaagtaaacgataataattaagccaaaggtaatcccaatcgcccaattcaaccgtttcttcattcgtttaaccgctggtggatcgactttcttagtccgacgcgttgctgtttctggttcgtcttcagtcaccgctttaagggcttctttttgttgttcacgtgcatattcacgttctgtcctgaggcgctcttgatcgcgctgtttaaaggcggcttcttcagcctctttttgttgtcgatattcttcgcgcgtcttaggttcattcgtcatttctaccgctcctattttgcttgtaattgccagtaatacaacgccataatcgttttggcatcacagattaaatcatctgcaacggctgcttgtgcttcttctaacgtcaacttttcaacgttcaagaactcatcgtcatctagcgagcgcttatgcgtgaccggcgttagtgtatcagtgtagtataaagtcattaattcatttgaaaaaccgggtgatgaaaagaaatccgtcacgtgcacgagcttttgcgtcgtcaaacccgtttcttcattcaattcacgtagtgcgacctgatctaagtccttttcacctggatcaatcttcccagcaggaatttctaacgtttcacgttgcatgggggcgcgccattgtcgcactaaaaggatgcggttatccgccgtaatcggaataatgccaaccgccccatgatgatagacaatctcgcgacttgcggtttgtccatttggcagtgccacttgttgaacggcaagatcaatgatctggcctttgaataatgtttcttccgagaggaccttttctgtataatccatctgctaatgccacctttaccgtttaatcgctattatacgcgcatttaaaatcgtccgccatcgtcaatgctaaattcaggttcacggccgaattaaaaatccatccttaggcggatactcttttaccttaattcctgttagaatgaaggcatcaattaaatcaggagctgacaattatgtttaaaaaaataacgatttggtgcacaggcatgctcattacacttgtctcaatcccaattttggcaacatgctttgatatttatggtgattgggataatttcctctggttcagccttggtttattattagggctgatctacgttacaatcagcctcaaacggcttaaacgacaaccagaatataaaaaagatcagcatatttcaccacaaatgctgaaacactaccaagatgctggcatgagtgatgacgaaattgactttttcagacaaacgatgcaacaagccgaagcgcaaattaaggtacttgcaaccaacatgcaagctcttcctaaattacgggcaatcgatttaaatcacgatacaaccaaggtcagccaatcgctttttcgtgcgattgtgaaagatccaaagcggcttcacaatgctggcgactttttataccggcacttaccatcaatcaatgaactgactagcaaatacatcgaaattaaccatcatgaagtcaagacagccgatacctatctcgttttagataaatcggctgcggcaattgatgcgcttagtcaacagattcaacaagactacgcggatttcgtggccgaagatgtcgatgacttagacacagaagtctccgtcgctcaacaacaaatcaccccagatcacaaggaggaagactaatgtctgaaacgcccaatccaacaaacgatttaatgaatgatttattaaaagatcctttcgaccaaagtgcgccagttgtcactgaggaagcagccccccaggcagaggcctcaattatcaataagctctcccctgaacaacaagcacaggccgaacaattggcacaacaactggacgtcaacgaccaacaagccgtcttgaattacggcgctcaagcccaaaagaaactcggcgctttctcccaaacaatgctcaaccaagtccaaagccaagaaacaggcgaaattggtgacgcattaacgtcattgatgtaccgtttaaacgaagccaatcctgccgaattacgcgccgaagacagcaacgttttcaagcggatgtttggcaagattaagaagtcggtctatgaaatcactgcgaaatatcaaaaaattggcgcccaaattgatgggattgccgttaaattggacaaagaaaaaaatgcattaatgcgcgacaatgagacgcttgaaacgttgtatgcgaagaataaagcctacttcgatgcactcaatatttatattgctgctggtcagttgaagattcaagaattagaaacaacgacgattccagaagccatggaacgcgccaaaaatgacgataatcaaatggtcgtgcaagaagttaatgatctcaatcaattcaagaaccgcttggaaaaacgaacttatgatttagaattagcacggcaaatcacgttgcaacaagcaccacagattcgcttgattcaaaataccaaccaagcattagctgaaaagattcaggcttccattaacacggcgattccactctggaaaaaccaagttgccatcgccctcaccctgctccgtcaaaaagatgcggtcactgcacaacgacaagtgtctgaaacgaccaatgacctcttgaagaaaaatagtgcgatgttgaagatgtcttcaatcgaaaccgccaaagaaaatgaacgcggcgtcgttgatatcgaaaccttacagaaaacacaaaatgatcttgttgaaaccttacaagaaaccctcaagattcaacaagaaggccgcgaaaaacgccaagtggctgaaaaagaactcaaccacatggaaaatgatctgcgcgaacacttattggcctatacccaaggtcaaaccgctactaacagcggaccaaaagaagttaattaaatccacaaaaatagcgccgcccatctttttgatgagcggcgctatttttgaatagttaagctattttgcgatgtttcaacatccgccaaccggttagagccgttgcgattaaacaaatcactagcgcaaccataaaggcatcatgcatcccagcgatgaacacattcgcgtgacctggaatataccccgtcactttttgcccgtaattgcgactcattgcggcatataaaaccgtcgttgacaatgaaatcccaaagaccatcccaagattccgcgcgagggcgttaatcccaccagcaatccctagatcttcaacaccgacggaactcatgacaatcgtgttattcggtgcttggaaaatcccattcccaagcccaactaagccaacgaagaacatgaataaccagatcggtgtttgtagattcatcaacatataaccgacctgactgatcgaaatcaacactaacccgataaaggttaacatttctggcccaattcgatccgagatactcccggcaatcggtgcgaccaccacttgaacaattgggaaaatcattaaactgtaaccggcaagattaggcgctaagcctagcgcattttccagatagaatggtgaaatcacattgaagaagaagttaacgatgaaaattaagaacgcacagagtaaactcaaactaaaatcgatatttttaaacaatctaaacgataataatggctgttctacatgttgttcaatccaaacaaagatgccagcactaattaaggcaacgacaaaggccgctaaaataattggtgaggtaaatccaatttgttggccgatgaaaatgccgaggaataaactaacaattaaaactacaaaactggcaaacccagcatagtcaattttttcatgtgttttaacaatatccttcggtaaaataaaatgcccaaaaataatggttaaaattccaattggcacgttaatccagaaaatatagccccaactaaaatgcgctaagattagcccaccaatcccgggcccggcaatgctacctaacgcaacgaatgatccggttaaccccaacgctcgcccacgctctttcagtgggaaaacctcggtaataatcccattattattgctcatcgtcattgatgcccctaaagcctgaagaacgcgtgcacctaataacaatggtaagccgccattaaagccacacaacaaggaaccaatcacgaataagagggttccaattttaaacactttgaccttcccaaaagcatcgccaattttaccgaataataataataaggcacaaatcataatcagataaatcgacacaatccattccgcttgattcatcggaatctttaaatcacggctcatgactggaagtgcaatattaacgatactgccatcaagcgtcgacatgaaggtaaatagtccgacagccgtcaatattcgccaacgatttttttgaacctgcggattatccacataacttaatgccatctgtgagtcactttctttcttttaagtttactccgtctattataccgtggttttagttaaaaataaaaaacttcctcaatcaaaaataattcctgattgaggaagtttccattacttcgcttgattttttctatagcgccaagtaacaacggtaaaaccaatcacaatgctgataattggttcaataaatgaataagtcgcaaacggtacatagtcaattggattaaccccgagagccccagctatgaagatcccactaacgccccatggtactaaggcgttgactgcagaaccaccggcagaaagcgttcgacttaaatacttacgatctaatggcaatttatcatatgctgatttgaacgtttctcctgaaagaataactgacaaatattgttcaccaaccaagaagttaatcccagtcgcactcacaatggtcatcataatcagcttcccaggtgtgttaacgaactgctgaatatttgtaatcagcacttcaaccacttgatacttaatcagtaagccgccaagtgataaagcaaggataatcaaggcagctgaatttaacatacttgccatcccacctcttgaaagtagcacattcatttggcgattacccgtctttgcaacaaacccattcattagcatgtcacacaatacttttagactgtaatgctgtttacttctaaaaagtgtgataaacaaagcactaaatgaactggttaataacgacggaattgcaggtacttttagccacgcaaaaataaacaagatgatgacgggtaaaatcgcccaaaatgagatatcaaagtgcgtcatcaatacgtctgccatttgttgaatgccggccatattagctgatttcgagctactaccgaccaccacataaaagacgagcgagattagcgctgctggcagtgccgtttccgccatacttttaatatgatcataaacatcaatcccagcaattcctgatgctaaattagtggtatccgacaaaggtgagagattattccctaaaagcgcacctgatacaatggcgcccaccgtcaatgcggttgaaaaccccaatatatgcccaattcctaaaaaggcaatccccattgttgaaatggttgtaaacgaactacccacggtaatcccaatcacagtacacaataagaaaatagttggaataaagaatttaaccgataccatcttaaacccataatacataatcgttggaatggtcccgctagcaatccaagttgccacgagcacgccaatcagtaaaaagataataatcggaataatccccggtttaatcccttcaactatgccatcatgaatttcatcccaagaataaccacgaaacttgccataaaataagagcactgtaaaaaccattaagattggaatatgtggtgtcatcttgtatttaatgattaaaataccaagacaagctaacatcccgaccaaaatcacaattgattccagtaaactcgttgtatgtttctttttttcttgtgtcatttgaacaccctctaacttattcaattgtcaaaactatcaaaaacggtcagacttttaacagctgaccgtttttttgaaactatttttgttgatgtctttttggatgtcaattaaccattgatcattcttatatttactaataataaatggaatgatagtgaagataactgaaatgataacaaccaataatgattgtgacaagcttgttgtgaataaggttgcaaagacaataatcgcaatccctaaaatcaacgcaattgaaacagcccatgcaagaccgttcctttttttaccaatgcggtatggacggtctaagtctggttgatctttacgtaatttcaagacagccactgcgattaataagtaaacaattgcatacaagattgttgttgcatttgttaacgttaagaatacgccgttgacatctttcatgaaaccatataataaagcaaataatgaaatggcgattgtttgtgttaaaacaacattttttgaaacaccatattggttttgtttgtggaaacctaattttgctggtaaataaccatcacgagcaacttggatgattgtctttgaaggacctgttacccaagctgataattgtaataacacaccaatgaagaccatgaaactgaagatgttggcgatcattgttggccaaccaagaatttgacaataaattaagattggctgtgtaatatttgaaagttccattttacccattggtacaacgttagcaactaacattgcgtttactaagttcaagacaactaagccaattaatgaaacgaaaatccctttagtaaaagtttttgatgggttgtgtaaacgtggaataaagacagatgacatttcaatcccagtaaagatgaatgagataccagccatatatttcaatgatgataaaccatctttagttggaattaatttgcccattgagaagtgacccaatgtaccgccaggcatgatgccgtttttgattaatgcagcaatccccataaccgccataataacgattggaatataaacacctaaccaaacaccgatattgccgccgactttagccatatcatattttaagcttaataatgtgataatccagtagaacacaaggatacaaccaagaacaaaccagtggttattccctaaagttggattaccaaatgagttacccaataaaggtccgattgttgaagcaaccattaccatccctgggaacatttgtacccaaagtaaccatgctgcaacgaaacctaatttactacttaacgctgttttaatccaaagttgtgggccaccttcttcaggcattgcagtccctaattcaccagcaatcaaagcaattggtaatgcaaagaacaataccgcaaagattgaataactgatttgagcccagcccgttgcagctaacgtaggaatactacgaacagttgcacataaagccatcgttaaaccaataaaggttcctaaggcaattttattaacttgtttattttccatttttacttttcctccgattttatctcacaataagaaagccgcttgcgcggctttctctttttactaaacaattacttagaattatttacgatcttcgtaaattgcttctaatttttcttgcatagcttgtttgatcttaggagcaaagtaatcaaagttttcttctttgttcatgtatggtgtcataacagcggcacgaagaacagttactttaccagcttcttcccagccttcttcagtaacgcctaagttattaacaaacttgaatgggctgttaccataatcaggaatagcgaagtcagtatgtgatgttaggtattcgttaccatagatgctaccagttacatatgaagcttggttgtagaattcatggtttaattcgttcatttctacaaggttgttgttaccttcttcttggaagacatagtcaaccatgttgaagtcaggatctgttaaaggatgaacttcaattgtcttgtcgccaactttaaattctagaccacttaagaagttgtagaaacgacgaacaccttcgattgaagcaccaactaatttaccataaccagtaacgttcaatggtaatgttttatgtgcagcccatactgatgcagcagttgcgccagcttttgaaccttcaagaatatatgcacccaataatgcaggaatatctgcacctttttcaaagacgtatgttgcgaagtatgaaatcacgtcgcgcatgcgaatatcttggatggcaatcccaccagctgaataaggaatgtaacccatcttatgtggatcaattgtaactgattctgcttctgggaatgcagcatatgcattgtaagtatgttctgaaacaaggttttcttcttcagtgaagacattgtattcagcaaatttgctttgtaggtctttgtatgaaattaatttgttatcttcatcaagtaagatagcacgaccataaccaccgtaagcagcatcaacgtggaagtagaagtagatgccttctttaacaagtttgttacgtaattcagcaatttcgttgatgccgtcaacagcaccttcttcagttgagccaacaacgccgacaaccccaagaattggtgtttctgtgcttgctaattcacgaacgattttttctaattcattgatatccatacggtaatttgaatcaactggtactgggattacttgatccaaaccgataccgataatatcagcggcttttaaccatgaataatgttttgtttgtggaactaaccatttacctaacttgtcaagatctttaccaccacgagctgatttagctttgatttcatcaatcttgtcgccgttagcttcaactaagtccatgatttctttagttgacatgtttgataattcccagtctgtcttgcctgctacaatagtaggatcaacagccttcattgcaaatggaagtgacttgatgttacgtgcataccataaaccttccaagttagctaatgaaccatcagctacgatgtggccccaaccatttgtgtaacccatcaatgttgcaaattctaaaccaacttcttcttccatttgtgaagttgctggtgatgattcatacgcaacgttattaccattccataacattgcatagttatatgccaaaatggctggcattaatgtttctgagttcatatgaccccagtaacgaccagcattatgtcaaggaactgattgtgaacgtaaaacgtgctgaaagttcgtctaaaacgtctttcatgttgttaaccgttccttggaattcaggtgatgtttgttgttcagctgaaatcattggtttgtcttgtggcatgtagttttgacgccatccaagatgttcgtcaaccaacttacctaacaaatctttgtaaagttgaccattttcagctttatcaccgataaatagagcagataaatctgtatcttttgcactaaaactattgttactcataacaaaaaatcctcctaaattgtagatatagtataaccccaatcaatagaatacgctcattgtccataaaagcaaacatatgaaagcgattccgattttttagagtacgaaaaatagccgtcaaacaacgtttgacggctacctttgcagttgtattttggggttatactatatgatctacattcacgaagaacccagtaacattcagtatagatacaaaagccttcatttaatttttggaacgtctctagtcagtaacacgtgctaagaagtaattcttcttcccacggcgaataatcacaaacttgccatcaaagctagtcatcgggtcaatcatcgcatcagtttcttggatacggtcaccgttaattgtaatggcaccattttgaacatcttcacgtgcttgacgttttgaagattcaatacctgtatccactaagaagtcaacaatgtttttagcttctttactaatttcaactgatggtgctttaccaaaagcttgttctgcttcaacaacatctaaagctttgatattaccttcaaaaagtaattcagtaatatgttccgcttcatctaatgcttcttgaccgtgaacaaaacgtgtcacttcttgtgctaaacgtttttgtgcttcacgtttttcaggttctgttgcaactttttgtgccaattcttcaatttcgtcttcttctaagaatgtgaagaatttaaggtatttaataacatcacgatcatcttgatttacccagaattggtagaattcgtatggtgaagtcttttcagcgtcaagccagattgcaccacctgctgtcttaccaaacttagttccgtcagctttcaacattaatggaattgttaaaccgtatacgggttcgtcgctaccttcaagtttatgaatcatatcaatccctgaagtaatattgccccattgatcagccccaccaatttgcagttggatgttatgttcatcatgtaagtgtttgaaatcaattgattgtagaatttggtatgtgaattcagtaaatgaaatccccacttccaaacgactagcaacaatatctttagctaacattgtattgatgttgaaattcttaccgtaatctcttaaaaagtccaacaatgagatttttgataaccaatcgtagttattaacaaaagtaacattggcatctttaccaaataatttccgcatttggtttgataaagcttcaacatttttttgaaccttttccattgtttgtaactggcgttctgaattacgaccacttggatcaccaattgatcctgtcccaccaccgattaagatgtatgggtgatgtccagctaattggaatcgtttcatcatcatgaatggaatcaaatgaccgatgtgtaaactatcaccagttggatcagccccacagtataaagaaatcttgttgttttctactaattcacgcaatccttcagcatctgtttgttggttaatcgcatcacgccatgttaattcatcaataatattttttctcatcaaaatttcctcctaaattaaaaaagtcccagtaatctttaataaaataaagattactgggacgaaatgtcatttttccgcggtaccacccgtgttatattttgaaagtgcactttcaaaatatcactctagattttaacgtaaattcaacgtacgatttgataaaacaaaaagtgtaattcgacttagaaacatatgtcaggtctcaccaaatcccgactctctgtaatagtggttactaattctactgcgcttttcaatcgctttattaacttatgtgcttatcatagttcacatgataaatgaagtcaacacttttatgctatttttttataaacatgaacgattttattctaatttaaatttaattaaattagaatagtcgtatttaattcctctaaattaaagttttacaacattcgcagcttgtggtccacgtgtgccttcaacgatgtcgaattcgaccgcttggccttcttctaatgacttgaagccttcgtcttggattgcactgaaatgtacaaagatatcgtcttgaccttctgctgagataaagccgaaacctttttcattgttaaaccattttactgttcctttttccatgatgttactcctttaaatacacaattattatctagccaccagaatcggtcatctaaacaagtcaattatacgcgattttgtaaccgcatgcaagcgtaaaataaattaattgagtttatatcgggtccgccgttgatattgttcgccaggatgcaaaacaatattaccaaactcggtatgatggatggcatctggcatcatttgggcttcaatcgccactgcttggtggggttgaattgcctgatttgttaagtttggttcgtccccgaagccattggcggtataaataacgattgcattcccttctgtatcaattgtgatcgagcggccactttcgggatcgcgtaaaatcgcatccgctttacccggcgtttgattcaacaggaatggatgatcaaaaccaccgaccaatttagtttgcgtattttcactatcaaaagcggcttgcaaagctcgcggttgacgtaaatcaaagacagagcccgcaactgggactaattccccggttggtaagccgtctggttgaatggcaccaaaacggtcactatcgatttgcaatgtgtgttggccaacaaattgatcaaagtcccccgtcaaattcagatagacatggcatgttgggttaaacaacgtggttttatcagtcgttgcttgatagtcaattagccattcattggcctcatttagcgtatacgtcgtggtcaccgctaaattaccggggaatccattttcaccatctggactcgttaacatgaaaacgacactaatcgcatcatctttttcaaccactgatgattgccagatttgcgattcaaaactattggggccaccatgattcgtgttggcgccattattaatcggtgcttgataatcatgaccatcgagtgtaaaagcaccttgaccgatgcgaccagctacgcgtcccactgtcgcaccaaaataagcttgttgctttacaaaatccgctagggtgtcatagccaatcacaacattggccatctgaccactttgatccggcatcaccaagtgagtaatcgttgcgccgtattctgtcacggctaattgatacccctgacgattctctagccaatactgccaaaccgtttgaccatttatttcgccaaatgcttctcgccaatacttcatgaatgttcctccttataggttaaacatgttgcgtaaatttaataaatgctgcctgaccttgttcgttgcatttgaaaacaccagcgtcttctagaacgcgcatgaacactttgccgacttcagtccgcactaattccgttacgttatctgatgtaatcgatgtgttagcggctttaatcgtatctgcccattcttgatggtaagcggccatctggtttggttgatcgcagagatagtgttcaacctcagccatttcatctttgagtcgtggtggcaaaattgctaagcccatcacttcgattaaaccaatattttcttttttaatatgttgcacatctgcatgtggatgataaattccatctggatgttctgcagacgtttgattgtcgcgtagtaccaaatcaatttcgaattgaccgtctcgcatccgcgcaatcggcgtaatcgtatgatgtggtgtgccgtcttctgagtgggctaagatttggacacttggatcgctgtaattttgccaactagttaaaatttgtgcagcgagtgtttccaaatgcgttgcattcgcactcgtcaaacgaatgactgacattggccacttcacaattcccgcctgaatatcattatacccgttaaaatgtagtggtgtctcgattggcgccttagccattggaaaatcgtgacgacccccttgataatgttcatgggttaagatcgaaccaccgacaatcggtaaatcagcgttactcccagcgaaatagccggggaactgcttcacaatctgtaataaatttttgaaggtcgtttcattaatcaccattggttcatgttgaccatcaaggaaaatcgaatgctcattaaaataagcatatggtgaatattggaagccccaagtctgacctgccaatttaaaacgaatgatgcgatgattacgccgtgctgggaaatctaaacgccccgtatacccctcattttccagacataattgacatttggggtagccggtttgtttcatcgttttggctaacgcaatttgtttcgggtccttttccggcttcgataaattaatcgtgatttctaagtcgccatattgcgtcggcacttgataagcgatatttttcgcgattgcggccactttaacgtagtcgttggcccgacttaattcataaaagtcggcaagtgcttgttggggatcactctcgtattgatgccaaaaatggcggttcaccgcacttggtaatggcgtcaccaaatccatcaacttcgcccctaaaatatcttgttctgccgctaaattctcaatccggctattcgcaactgcaagacgcaacaacgcgtcctttaatccgatgagactttgatcagtcaccgcaacgttactgtcctcttcaccaacaaggtctaagacgagattaaataagtactgttggtcttctgctttataaagtgtgtcttgaaagataatcactttttcaataaatgtttgaatcaattctcttgcttgcatatgctttcctctaccgatctgcgtatcctgctggatgatttaaatgccaattccaggcagtttcaataattgctttcatattgtcatactgtggcgtccaacctaagacttcgcgtgctttgtcacttgcggcaatcaaagtacttggatcaccagcacgacgcggtgccattgtcacaggaattgccttgccagtcactttgcgagcggcttcgacaatttccatatttgaaaaaccagttgatgagcctaagttaaaggcgttactatcatggccttcttcgaggtaaccgagggccaaaatatgggcgtcggctaagtctaacacgtggacatagtcgcggacgttagtgccatctggtgtatcataatcatcaccaaagatggagagttgttcacgtttgccagcagccacttgtaacacgattggtaacaagtgggtttctgggtgatgatcttcaccgattgaaccatctggtttggcaccagcgacattgaagtaccgtaatgcaacgaatttaataccgtaagctctgtcagcccatttcatcatcgtttccatcattaatttactttcaccatacgggttagttgggacttgtgggtcggattccttaattggaattgatttcggttccccataagtggccgctgttgatgaaaagacgatgtgtttgacgtcgaattcattcatcacttcgagtaaggcagtcatgccgtatgtgttattgtcgaaatatttaagtggtgcttgcatcgattcgggcacgattgagaaagcggcgaaatgaatcacaccgctgactttttcttgttggaagacgctgcgcatgaaatctttgtcgcgaatatcgccttgataaaagcgcgcttgtggattaatggcggcttgatggccggtgacgagactgtcgacaacggcgacatccgtgccgcgttgaattaattgatcaacggtgtgcgagccgatgtagccggcgccacctaatactaaaactgtcatcttatcattctcctcttcagttgactgattaacctaattttttagcgccatcggcaatttctgccacgtagaaacttggcgcatacccaatcttgtctgtataaactttagcaacattcgtttcaaagttgtcgacttggtctttagcaacaattgcaatcgcacaacccccaaagcccgcaccagtcatccgagcgcctaagacccctggttgttgccaagcggtttgaacgagtgtgtctaattcgatcccagtcacttcataatcaaattgcaatgacacgtgtgacgcattaactaatttgccgaaacgttcaaggtcgttgttcttcagggcttcgcgggccttcattgtccgttggttttcagaaaccgcatggcgtgcacgtttcaacaagttttcatcttgtagcatgtatgtttgtaaatcaaaggtttcgttatctaaatcgcccaatgattgaatatcattcttcgtttgtaaaatggctaaggccttttcacattcactgcgacgttcattatattttgaatcggccaattcacggcgtttattagtgttcatgataataatcacattgtcttgcaaatcaattgggactaaatcgtaatccaatgtgttcgtgtctagtaagatggcatggttggctttgcccattccaacggcaaattgatccatgatgcctgagttaacgccgataaatttattttcaaccatgacaccggttttaacaaggtcgacacggtcaatttctaaattgaattggtcttctagaatcacacccattaataattcaattgatgcggatgatgataagccagcgccgtttggaatattgccttttaaataaatatccaaaccactgtcgattgtgtaaccttgttcttgaaggtaaacaatcatcccttttggatagttcgcccagttgtgggccttttgataagataagtcgctgaggtcaaatgaaatgacacccgcatcttcaaagttcccagataataaattgattgtttggtcatcacgtttagcaacgactgcatatgtgcccaatgtgatcgcggttgggaaaacatgcccgccgttgtaatcagtatgttcaccaatcaagttaatccgacctggtgcgaagtagctcgcttccggtgctttgtggaatgcgttttcgaatgcagtatttaattctgtcatgttcatagtaaattcctcctttattaatcgctttcattttactaaacatttactaaaaaatcaatcttttttgttaactatcgctttcttttcattggttatgctaaactaagtaatagtaaacattgaattgagaggtgcaccttggcaacgatcaaagatattgctcaactcgctaacgtttcgaatgcaaccgtttcgcgggtcctaaattatgatcaaacactttcggttggcgatgagacccggcaacggattttcgaagccgccgaaagtttaaactatcgtaaaaacacgcgcaaaatgaaccagcaacgcggacgcattgcgattgtcgaatggtataccgctaaagaagaattggaagatctatactacctctccatccgacttggcgttgaaaagaaactcaaagaacttggttatgacgtaacacgcttctttcaaaacgatccatttgatacgctccatgatgctacgggtgctgtggtaattggtaagtacagccctgcgcagattaagcgcctcaaaaaactcaaccacaacctcgtcttcgtcgacatgaacacgctcgattatgaagtcagctgtgtgatgaccgacttcaaaacaccaattaaatccgtaatcaaccattttacaaccgctggcttaactaaaattggtatgttaactggtcaagagagcactgctgataatactaaattgggaccggatccccgttttattcattttaagacgttactcaaagctcaaaaaaactatcaccccgattggattttaaccggtgactttacacccgaatcaggttaccaactcatgatacaattattacaagaccaaagttccgatttaccagaagccctcttcatcgccaatgatgcaatggcagtcggcgctttacgcgccttacatgaatcaggcatcaaagtccctgaacaactcagcctgattagtttcaacgatacctcaatttgccaatacacgttccctactttaagttccgttaaagtttacactgaacaaatgggccaatcagctgccgagttattggttaaacaactcgccgctagcgaaattatcccccaagtcattacgattggcacgacgctgacactacgcaatagttcaaaataataccttcagcccaccgatgatcaattcatctcgtgggtttttatcttgtctcaaatcaattttcattaataggagtatctcttttgaaaacgaaaaaaattagacgaaccatcttaaccattgctatcttggcagtcggttatctcggtggtcgcaacaatgtcttacaaaatgtgttccctgctacagttgctactgagcaaccagctaaacaaacacccccagtcagtcctgattatcaagccatcgctgatcaagattttaaaagcggagctgcggcctatctaccaattaataacgaacaaagccaattaacagcaacggattggcaaggtgaaaaaatcgtctatgggcaactcgaccagcttaaccgaacaactagcgtcacagcttacttatcaaagcggaatctgggcaaatcagaaggccggacgcgccaaatttggaatccaacgggttggcataatcaacctctgattgtcaatggccgccgaatcacaccgcaaaatcgtggccacttgattgcttatacactcacttttaattttgatcagaatggtaactttcaagctggtcaaccaggcagtttagataatccacttaacctcgccacccaaagcgcgtacagtaatcagaaaacgatgcagatttttgaagaaaaagtccgcactgcgctcgaagcaaacaaaaaagtgatttacaaagtcacgaccgtttttcggggtaatgaactgatgccgcgcggttactgggttcaagccatttcaacagatggcacgctgaatttcaacgattacgtctggaatgttgaacctggcgtcgcattcgattacatgactggtcgttctcacttagatgctagcatgcaagtcaaagacggtcagaatattgttgaccgcaccaaacaacaagtcaaacaacttttctaaacaaaaaaaagaggtagcaaccagaataattctagttgctacctcttttgctagcttatttttccattgccttacgcaatgcagcggctaatggactttccgctggttcatcttcttggttcactttttgaatcaagcggcgttcttcatgtttagagattttcttcttacgatctttcttgtcgagcatcttttcggtcgtcccatcattaagacaccggaagtatgcgccaccttgcccttcaataatcaccattttcttgtgacattgtgggcagcggtggttggaaaccttcggatctttccgacgccgatagtgacagtttgtgcagatataaattttaccgtcacgcgtattgcgttcttttaacggatgatcacattccggacattttttattcgtcactgcaaaatcgcggtattccgtctcactctttttaatctcaccgaccaaggtcttagtggcaccctcgatttcagtgatgaacgccttcggattttcttcgcctttggcaatcgcttcaagcgactgttcccattttcctgtcagttctggtgaaaccaaggtctgattaaccaatttcaaaagttgctggccttttggcgtcactgctaaagcatgaccttgtcgttctaggagttcactacggactaatttttcgatgatttcagcacgagtggcaggcgtccccaaaccgtagtgttccatcttcccgagcaacgtcccttcagtcaatggcttaggtggcgtcgtcaattgttctttaaccgcaaaattagcgcgaactaccatcccttctcgccagtcgaccgtcgcggttggttgcccctctttatcggcagcatgccaaccttgttgcacgacttttgtttgcttaaacgtaaaggtttgatcaccaaacttaacggtggctttcgtaacagctgtcacgtatggatcagcaaataaccctaaaaagcgttctacaatcaagcgatacatgcgtagttcatccgtcgataatttttcggcacgaacgggttcttcagttggaattaaagcgtagtgatccgttactttgccatcattaaagacggctttttgtttgacctgactgccttgccccaagtattgcttagcacgtggatcaaatttgactaatgccgacaaccgttccttcaaagtcccttcgatatctgttgagagatatttcgaatccgtccgtggataactaacaactttatggatttcatacaatgattgaatcaaggataacgtctttttcgcggataaaccatactttgcgttggccacttgttggagttccgttaaatcatatggtaaaggtgctgattgcgatttctgcgttgttttgacgctgaccacttggcctttggcttgttgcaattgtgcaactaagtcgtctgccgcttggcgcgtcttaatactttgcggatttgctaattgtaaggcggcttgctgttgatcgaccgtcaagtgaattgtgtagtaggtttgcggtttaaaacgattaatttgttgtgccgtttcgttcacaaaggctaacgttggtgtctgcacccgaccagcggataaattatcttcatacttggtcgtcaatgcccgtgtcacgttcaagccaatcaaccaatccgctttgccgcgtgctaacgctgatgcgtacaaattgtcgaattgcttggctggttttaagtttgcaaaccctgctttaatggccttagtcgtttgcgatgaaatccagagccgttcaaccggcttatcgaatttaatccattccaaaatatagcgcgcaacggcttccccttcacgccccgaatcagttgcaatcaccgcacctgaaatatctttgcggttggcgaggtgactgatggcttttaattgcccacccgttttaggcaatggctttaagccgatatgtttcggaataatcggtaagtcttccaaacgccattgttgccattcttttttgatatcctctggtaattgcagcgataacaaatgcccaaacgcccaagtgatgacgtattgatcgccctcaaaataggttttagttttctgagttgttcctagaactttagcaagctctttggcaacactcggtttttcggtaatcactaattttttactcatgactggttcctcttcaattcattgatcagaatagttgctgattactagtataacccaaactgaataggaatgtaaaaaaggcccccagcaagggaaccttcttaacagttgcttattcaaaagtcagttgatacttaaattgttgcgactgtccaccactcaaaacttggttcgcttcttttgtcagcaattcttgaacttggccatattgatcaggcattcctgcaaatggctcaatgcataagaagttttccgtctgattttccaacgtccataacgccatgtatggaaaatcagtcgtcgttaatgtgatttgcgcatccgtcacggcgcttttcaagctaacctgttgactgggccgatcgaacaataataatccttgatcaaaccgggcatgttgcaattcaaaacggcctttttcaagcgctaagacttggcgtttgcctgaacgaaatggtgcaggatcaatcgcatacaaatctaattgtgcaacttgctcgccaaaatccaaataataatccgtaaattctgttccacgcgcaaggggcacgttaaaacctggatgactacctaacgcaaagctaaaatcagccgaatccagattgcagacttcatactgggagtctaggcgattttcaacgatttgataggtgactagcaattcaaaattaaatgggaataagggttgcgtttgttgattgctagttaggcgtaacgtcacactggctggtgtctgtgtgacaacttgccacacacggtcgcgtgcaaaaccgtgttgcggcatttcatacgattgaccactgattaagtaatggttatcgtttgaacgcccaattgctgggaataaaattggcgcatggcgttgccagctttcaccagaccacagataatcaatttggttttgcttattcgtgatttgtgttaattctgcgcctttttcattaatcttgactaataatgcatcagattcaattgttaacaaaatgctccccctttagatcgatattgatttaattttaatcagctcgccggtcacaccgacttgaatgccttgttcgatcttatccgttcgcgatgcgtgcactaattggaatttattttgttttacgattctgtgattatccgttaccagtggttgggtaaatggttcattgcttccagccagtaacatgacaatgactttgaaccccgcagcagtgacttgaatggggctgtaatgcaacgtatcgctatagaattccactacttgaccagcaggaatatagaataatttcgcatcctggtgtggatcaaattgttggttaggttctaaatcagcgcgtttgccaagcaccattaccacgtcagtcaatgtaatgttcacttcactaccttggtgatattcgattgctgaaaagtcactcgtatgccccgtacactcccctgcttcgattgccatccccgcgaaaacatcacggccaatagcttgcatcattgagattgcttctaactgcggattactggtgacatacacattctgatctttaaccggaatcgatgccatcgcttgtttaatggtcgttaaatcatattgcggataacaaacgccaaattgtcgaaaactaggatcatcgaccgtgagaatttgatactgcggattagccgcttgcagtgcttctaatgttgtcattgattgactcaccttcaattaggaattatgaacgtattttatcaaaccacggtgttgctgttacttttaagacttcgtttaaagccacgatattatctttaccgttggttcttaaccattgacggccagcttcatggtccttagcaaatggtgcaacactgtttttccaagttgcacggccacataaaacaccgttgaattgtgcgccggcttcatgcgcaaatttcaatgtgtcttggaaaagttctgctgaaacaccagcactcaagaagatatatggtaatgcagttgcatcactttgttccttgaagtacttcgttgcttctgccttagtataaacagcgggacgatcttcattgaagccttcaacatatgccatattaaccggaacttcgaccttcagcacgtcgatgttgtagcggtctttagagaattccttcatcatttcaatcactttgtgtggtttaactttagcgaattctgcaccttttacatcgtcgttcttagcgtcgtatgtgactaattcacagaagaatggtaaatcctctgccagacattcagaaccaatccgttcaacaaaggcttgtttcttatcattgatgctggcatcttcatccacatcatagtataaaaggaacttaacagagtctgcgccagcttcttttaagcgttttgctgaccattcactgattaaatcaggcattctacctggctcagttgaatcataacccgttttttcataagcaattaaaagcccagttccattagctgtcactttagttgctggtagcccgtattctggatcaagtaagattgatgaagaatatggtgttaattctgacgaaatcgcctttttaaattcaatcacatcttggtcggttacttcttccgtgtcagaagcactcgctaacatttttttcaatgaaccgcgttggtcaattgctaatgctgcaatgacgccatcttcatttgacattttctttaataaagctaatttatttggtgacatatttttacccatccttcatttagttaatttttaactgcgatcaaatcggttaatgctatatctaacaacataaattgtggtcttaattaaagcgtaagcgattacattctaatcgtgatagtacccttctgcccagagtttattttcacgatcaaagaagtgtggattgtcgtgttgttctggattatcaggttctaaggcatcaattttagcaattaacttgtcatcttctggtgtcccttggtatgacgcttcgatgaatgcgcggacaatttcttcacctaaatgttcgccaaccactgcgccaccaaaactaatcacattagcatctaaatgttctttagcatatctagcagccactggatcggctactaatgcagcccgaatccctttattcttatcagcggcagttgaaatcccaacaccagtaccgcaaatgactacccctaaatcagccttttgatcacggactaaatccgcaaccttcaagccaaacattgggtaatgcgttcttgtattatcatatgtcccaacatcaatcacatcatgtccttgggccttcaagaaatctgaaatcttcattttttcagctgtaacaatgtgatcatttccaatagcaattttcattatagtgacctccgattaaattaatttctccaacatatctaaacgaatctgatgacggccgcccgcgtaatcaacactcaggtattcatcaacgattgcttctgcaagtttattgccgaccaaaccagcaccgattgcgattgctttggccccattatgttcagtggtcatatgtgctgtattttcttcagttacgttagctgttaccatgccgtgtagcttgttgcttgccattgctgagccaaggccgaattcgtcaaacatgatgccgcgatctacttcaccttttaaaacagcttcactcactgaaactgctgagtctacaaaatcagcagctggcgttggtgttaaatcaaccacttctagatttttttctattagatattgtttgatatgttcctttaatccaaatcctgcttgatcagttgcaattgcgattttcatattattcactcctatttattttatttgactagcttcgtaaactgagaatactgcttgacctcctcgtttgtaattgattgatcggtaattaaaacatcaacatcatacaaactatagaagtgatagaaatcatcccgattgagcttgctagcgtctgccaaaatgaatttctgctgtgcattattcaaagcaatcccttgcgtcttgccttcttcagcactcgcattcatgattgtttcattatggatgccgttaactccaatgaacgtcttgtcgtatttcagtgtctccaacgttgcattggctaaattcccaataaaggcccctgaacgactacgataattgccacccactaggactaattcccaattattgtcgcgcgtttgaatactttcaaacactggcaaactatttgtcacaactcttagcgaattgacttgaatgtattgcgccaacaattccaaggttgttcctgaaccaatgaagattgtgtcttcttccttaacgaactgtgcccccaactttgccactttttgcttagcatcgatatgaatttctcgcttttcaatatgtgaaagttcatataacgtggggcctttgatactctgtgcaccaccatggatgcgaattagtttcccgctttggtttaattcatccaaatcacggcgaattgtcatgtcagaaacattgagcgtttccatcaatttggttgttgtcaccaaccctgaagcattaaccattctaagaattgcgaccagtcgttcacgttttagcatttcatcacctctttgttcgaaaatgtttgtttcgaacataaattatcatctacacaccaaaatgtcaagtcccccagttggttttttcactaaaatccacgtcaaaatacgcgccattcactttttctgattaccatcaatccttttagtgacccacctttaccgcacctcggtgccatttaattgcgagtttgattgcagcctaaaataaaaaacacgaccgagttgaattacccaattatcaattgtttgcaatgcattcttttaaattaatttatttttgttttaatctaaaactactacttaatgtgcccgtcacttaagttaattttgtgataaaaacggttgacagctctttagtaagcggttacactttacctgtaaacatttacaaacattatcaaacttttttactcaagtggaggtgataaaatgcagcaagatctttcaacatctttattatttcatcaagaaacaacctttatcagtgatgcgacatctcaagatgccgtttttaaggaaattgcccaaaaactttatcaacaagaattagtcacggccgattttcttgaaaacctcattagtcgagaagccaattatccgacaggcttggatttaaccgttatttctagtcattatcccaatattgcaattccacatacagaaagtgaattcgttaaaacctgtcggattgtaccggttaaattgaaccatccgattacattccataatatgatcgcaccggatgcgtcatttgaagttcgttttttgttcatgatcctaaatgatgatttaggcgatcaagctgggatcctagcgaacatcatggattttctcagccggacacctaaggatgacttaatggcattcttccaattagaatcaaccgaatcaatttatcaatttttagcaaaccattttcaaaattaattagggggtttttattatgattaaaattttagctgcttgtggtgctggtgttaactcaagtcaccaaattaagagtgctttagaaacagaaatggcagatcgtggttatgaagtgacagctgacgccgttatggttaaggacatcacagaagaaatgatgcaacattatgatatctttacaccaattgctgcaactgatttaggtttcgaaccatccattccagtgattgatgctggccctattctctatcggattcctgcaatggcagcacctgtatttgatcaagttgaagaggcaatcaaaaatctgaacaaataaagcagttcttttgctaatctaaggagatgtatctatgtctactatcatccattttgccaatgttgtgttccaaccaatcattgatcttggtgccgcaccaatgatgatgattgttctaacgttaatcgcattactcttcaaagttaaactttctaaagccttagaaggtgggattaaattagcgattgctttaactgctatcggggcagttatcggggtgttaacaacctcattccaaggcgccttaaccgaatttgttaagtcaactgggattaacctctcagcaactgacgttggttgggcaccacttgcaactatcacttggggttcaccatacaccctttacttcttattaattatggtgattgtcaacatcgtcatgttgattttgaagaagacaaacacattagatgttgatatctttgatatctggcaccttgctttcgttggcttattctcaatctactgtggcgctaacttaatcattgcaacattattagtcattttcatcggcgttcttaagattatcaactctgacttgatgaaaccaacgttcaatgatttattaaacgcaccagattcaaacccaatgacaacaacacatatgaattacatgatgaaccctgttatcatggtctttgataagatttttgacaaattattcccatggttagataaatacgattttgatgctgctaaattaaacaaaaaaatcggtttctggggtagtaaatttgcaattgggatttatttaggaattttcatcggacttctttctggacaaggaccaaaagaaatttttgccctatcatttacagcggctttctgtttggaactattctcactaatcggttcttggtttattgcagctgttgaaccactttctcaaggaattacaaattttgcgaacagtaaactccaagggcgcaaactcaatattggtttagattggccatttattgctggacgtgccgaagtttgggctgctgccaatgttttagcacccattatgttacttgaagcactcgttttaccaggcaacaaactattaccactaggtggtattattgccatgggtgttacaccagcactattagtagttactcgtggtaaggttcttagaatgattattattggagccttggaattgcctatcttcctttgggctggtacattatcagcaccttttgtcacagcaacagcgaaatctgttggtgcatttccaaaaggaatttcacaaagcgctctaatctctcatacaacgatggaaggtcctattgaaaaattcttaggctacttagttggtaacgctagccaaggagatattaaatttgttctctatgccttagcagcacttgcagcatatttgttaatcttcatctggtatgcattccaaatgaaaaaaagaaatgctgaatacgcagcaaaagatcagaaataatagttaatttcaattgaaggcggcggttacgccattaatgtaaccgctacctttttcgcatacaaaaagccctaccaaatatggtagggcttttcgttgtgtggagttgctattaatattattttttggtacatccttagtgtagcaaaacctgggcagcattccagttacaagttcagcgaattgtccggaaagtgaacaatatcactaaattgtttagtcacttttaacgattttctcaagctgcttcaaattaaaacataaccgctcatcaatcacctccggttcggtctgcagattattttcaaaccaacaatctaattggcgaatgattgcaccgccgtaaaagtcttccaagtgatttaactgttgtggcgtgtattgtgctttgtaatggcgcaatgccttatgaataatctgtttcataacctgttcaaaaaagcggcggcgttccggataatccgctagatgatataaattcaagcaaaacatgcgataccgtgtaataaattgaatggcttcatgacagccggattcccaatcgccactcactatactctcatcaactttttgaataatttgttgttcaagtgtccaccaaaataagccgcacatgcccgttggaaaatgattataaaaggtcgttcgtgataaattagccgtcttcaaaaaagtcgcgaccgtcaatttcgtcgctttttgatccattaataattcgattaaaatcattgccatatagcgcttagtcgcttgtcgtcgtgtcatttacccacccgttccgattactattttcattctaacaacaaataatcattaatagtgaaattattagcaaagattaatcttttatcatgaaaacgttatctatttactcttgactgcacaaaaaaagcggtgcgaacgtaaaagttcgcaccgcttttagtgattattatttttctaaaccttccgcaactgcttctgggtagttggctgtgacaattgcagcacaacgcgcacaaagcattgggaacttatcatctgaaccgatatcagtcttaatcatccgacaacgatcacagacgtccccctcagcatgcgcaactctgaccgcaatgccatcaaattgtgtcgcttctgttggaacatcggctgattgatccgcaattgttaattgtgagacaatcaataattgtttaacatcagcatccaatgaagctaataaagcagcattggcttcgttgggataaagtgttacggccgcttctaatgacttaccgatgaccttgtccatccgagctgtttcaagagcttttaagacatcgtcgcgaatccccatgaaggcgttccaagtttcaactaagtcttcttcaccggcaaaatgttcaacttctggcatttcagctaattgaacgaattcttctggttcgtgtaagtagctccagatttcttcagctgtgtgtggcaagattggtgtcaataacttcgtcaaggctactgctactgcatagaaaacagtttgtatgttacgacgaggtgcatcattttgaccatcgatataaacaacgtctttggcgaagtctaagtagaaggctgataattcgttcgtcaagaacatgttaattgtcttataaactgtggcaaagtcgtaagcatcatacgccgctttacagctggcgatgattgcgtttaagcgcaccaacatgaacttatcaactgaacctaattctgcgtaatcaactgtatctttagcaggatcgaaatcagttgtgttcgcaatcatgaaccgcattgtgttccggatcttccggtaagcttcaccgacttgttggaagttttccattgtgactttcacgtctgagctagcatcaactgaagcgacccagaggcgcacaatatccgcccccatttgtttgatgatcttttcaggcaagattgtgttcccaagtgatttactcatcttacgaccgttaccatctaagacaaagccttgtgaaataacagctttataagggctgacttcgccaactgcaacactggtaattaaacttgagttaaaccagccacgatattgatctgaaccttctaagattaagtccgctggataagttaagtcatcgcgagccgctaacacagcttgatgtgatgaacctgaatcaaaccagacatccatgatatctttttcttttgtaaattcaccatttggactcccaggatgtgtaaagcctgctggtaataagtctttagcatcccattcaaaccaaacgtttgaaccatgctctgcaaagagttgcgccacacgttcgattgtttctggcatgacgatttctgtgccgtcttcagcatagaagattggtaatggcacaccccatgcccgttgacgagagataacccaatcgccacgatcacgaatcatgttgtaaagacgggtctttccccattctggcatgaattcaactttttcgatttgtgctaagatttgatcgcggaacgcatcgattgaagcaaaccattgggctgttgcccggaagataacgggtttctttgtccgccagtcatgtgggtaactatgcgtgaagaagtcgagtttcaataatgaaccgttcttttcaagcgcttctgtcaccattgggttggctttatcgtaataaacgccttcaaaaccaggggcatcttcagtcataatccctttgctgtcaacgactgaaaggactggtaacttatatttagtgccagcgttataatcatcttcaccgtgacctggtgccgtatgcactaaaccagtcccagtttctaatgtcacgtggttgcctaagatcaccaatgattcacggtcatataatgggtggcgggctgtcattaattccatgtcagcacccttgaaagtcttcaagatttcaactgattcccaaccaagaagatcagtcatcttgttcaaacgttctgctgccacaacgtatttttggccgtcagctaacacttgaacgtaatcgaaagctgggttaaccgcaatccctaagttagcaggaattgtccatggggttgttgtccagatgatgaattttgtatccgcatctaataagtctttcccatccaccacgttaaacgccacgtacattgatggtgacttgatgtctttgtattcaatttcagcttccgctaaagttgattctgatgaaggtgaccagtaaacgggcttcttacctttatagatataaccttttttagccatttcaccgaagacccgaatttcttcagcttcaaaatcagctgttaaagtgatgtatgggttatcccaatcagcagaaatcccaagacgcttgaaatcttcgcgttgcttgttgacttgttccatggcatagtcgtaacaaagtttacgataatcaacgaggctcatttctttccgcttgataccttttttagccaaggcttgttcgattggcaaaccatgtgtatcccatccaggaacaaaaggtgcgcggaacccgttcattgctttgtaacgaacgataatatctttacttgttttatttaaggcgtgacccatgtggatgttgccgttcgcaaatggcgggccatcatgaagaacgaatgaaggtttaccttcatttaatttttgccgttgttgatagaggttgttatcggcccaacctttttgccaatcgatttcacgattcggtaaacctgctcgcattgggaaagctgtcttgcccaggtttaatgtttctttgatacgcatcaaatcactcctttatttttaaaaacaaaaaaagatcccgccctgaataggacgaaatcttcgtggtaccacctaaatttgaaggtcaatgaccttcctcaacatgcaataacgcgcattaagcgtcccaaattactcaattcatctggaatgaaataaggtgatacaccgctaaacagagcattaccaaccttccaccgtcgttggctcgcttaaatgatgttttgcttgctagtccttatttaaatctgttgcttggttttcaattgggttgtaagaatccgtaacagcttcaaccacttcatctgaatcggtgtcttcgactacatcggagagtacttcatcattgtcatcttcttcgactggtgtttcttcaccagggaaaataatggtttgcgttgttgtcacatcatcttcagcaatttgaccccaaggtttaacttctgcatccgagtttacttgatttgacccatggttgtcaaggtctgtcatatcaatttcagctgaaagagcttgatggtccgctaaatcatctttagctaataaatctgtccattcaggactcttaaccacttctaattgtgattcaagcataacttgtaatctttgacggaaaatccgtgtttgtttcttcaagtcatcggtttcgattgcaatttgttttgcacgttcagttgcatcgtcaatgatgtggtttgatttttcagttgcatcatccaacattgattttgcattcttttctgattcagtttgaatcatttcagcttcttttttagcgttatctttaacacggtcagccgcttcttgtgcaacaatgattgattggttcaacgcatctttcaattcattaaaatacgttactttttcatcgcttgattttaattccgcttttaaactttcattttctgttaaaactgattcgtagtctttaatcacttgatctaagaaatcattgacttgatccggattgtaaccccgcatttttgtgttaaattctttgttatgaatatctaaaggtgttaaaaccattttgaaattcctccatctttttcagcaattattttcttaaaatccccagtgtcactcgatatttttctttacgagtctgaccatcaatcgattggagttgaatccggccaaaaccacgaacagagacgatatctaatagtgctaattcaaaatctggtttatcaaatgcttgccaattcagtttaactttgttggcttgaattaattctttagcgcgttgtcgcgacagattgtaaacagttgaaatgatcgtatccaagcgaaacgagctgacagtcgtttgttcgaattgccaagcgtccttaggcgtcaacaactgtgtatagtcttgttcttgcaaatgaactgatacgcgaccaatcttagtgatttgctcttcgacatagcctgccatcttcttcgtcacaaagaattgccagcgttcttcatcggtcataatatccccaaaaacatcacggtcaatgccagcattcacaagcgtgccaagcaccttcccatgtgataggtttgcaaatttaatcgggtaccgaatctcaaataattgaatctcaaaatccgcatccgttggttcaaagtaatctggagcaatcattgcccgtttccgttcagcagcgttatatccgccattaaagtgataacggacgtcccctttttcaccgaccaaggtttgtaaaataaacgcttgacgcggatctaaaaacgccgttaagattggtcgatattcaacttgtgcttgctcaatccaatccaaaacctgcgcaacaaatggcgcctcgctttttctaaaatgttgatagacatctgcttgattgaccattgattacatccccactaataattgtgcgagtaagccgatcccacgttctactaaatataaaacgaaaaacgcagcaatggctgaaatcccaataccaccgattgcaggaatgaagcggtcaaagatttctaagaaaggttcaactaacttagcaacaaagcgccctaatttactgcccatcgcctctggaatccacgttaataaacaatagattacgacgatgccactataaatccgtaccacatacatgagcatcaagagcacataaaataaaaatagttgcacctagttcacctcaatatcaaaatcattttgatcgacaatatctgaaagattaccatcgatttcatagttcggtggcgtacataagaaaatctgatcaccaacccgttgaatttcaccgttgatggcaaaaactgcccctgttaggaaatcaacaattcgagtggcttgtgtcgcttcaattcgtgtgaagttaacaatcactgctttattttcaagtaaacttttgccgactttttttgcgtcggaataaatccgtggttcacataagacaattttattcattttagtagctcccgcagcttgcatcgagacgacgttattcgggcgaacacttggttcaccttcattagtgacagccgcagtttcttgcgtattagcatattcatcttcatctgacatgccgaaaaaattgctaagactaaacttaccagccatgagtcatcctccttagttattgcgacggcgcttgaaaaatggcggcacatcgtccccatttgggttatcttgcttattatcatccgcttgggctgtccgtttgaagatatcgaaatctttcttttcaatttcatcaaatttttcagttgcttgcgcttgctcgcgggcacttggttcgcgacgcatatcccaatctacaaatggatcattattttgttctgatggtgttgaaggcgctgttgtctttggtgctgaattgtttgttgctggacgacgtttgttgttatcttcatcaatcccagttgcaataaccgttacaacaacttcatcaccaagattttcgttgattgaagtcccgaaaatcaagttaacatcgttagttgcagcttgttgcacgataccagcagcatcttgcgcttcaaacaatgacaagtctggtccacccgtgatgtttaagaggacttgttctgcaccatcgattgaaacttccaataatggtgatgaaatagccttcttcgttgcttcagctgtccggttttcacccgttgctgaaccaatccccatcaaggcagagccttggttagccataactgttttaacatcagcaaaatccaagttgacaaaccctggtgatgtaattaagtcagaaatcccttgaaccccttgacgtaaaacattatcggcttctttgaaggcttccatcattggtgtcttcttgtcaacaatttcgagtaaccggttattagcaatgatgaccattgtatcaacatgttgctttaattcagcaatccctgaagcggcgtttttaccacgtttagggccttcaaatgtaaatggacgagtaacaacccccaccgttagtgcgccaagatctttagcaattttggcaacaacaggggcagcgccagttccggtaccgccacccatgccggctgtgacaaagatcatgtcagcgccttttaaggcttcgttgaggacttcttcactctcttcagcagctttttggccgatttcagcagttgcgccggcaccgaggccgcgagtcaacttaggtcctaattggatctttgtttcagcttttgaatcttcaagtgcttgaacgtcagtgttagccgcaataaaatgaacgcctttaacgccttcgttgatcattctgttgacagcgttaccaccagcaccaccgacgccgattactttgatgattgcgccgctattttcttgtgctgcatctaatgaatattccatctgtttttcctcctgttacgactagcccttattcaaaaaagttactaaagaaatttttcaggccttcgaatgcattttttgattgatttttaggtttggttttcttacttggtacttctttggttgttgcttgagatttcattgttgatttcgtcactgtttggtctaattcagtctgtgctacattcccaagtgcgccttggaccaaccaatcaacttccgacaagttagctatgtagttaattaaactcaacccttgggcaaatgatgggtgccgcaagcccatttgatctggaatgtataacttcactgggcaattaaagatttccttagccaagtcgacaatcccaggtaaagctgtcacgccaccggtcataatcaccccaccaggcatatcaaaagcgtgtactttatccaattcagctttcaaacgatcaaaaatctgcatcgtccgtgcttcaataatctcagctaattttttctctgtcacttgcactggtaaggcttgaccaacaacttcaattggaatttgttcttcttctgaagcagccaatgaatcagcattgccataatctcgtttagctttttcagcattttcaattgacgtgttcaagaccacggaaatatccttggtcatatggtcgccaccttcttgatcaatcgccgtaaattttaattgatgatcatgaatcacagcagctgtactttgaccaccgccaaggtcgacaacgattgccccaaaatcttgttccccgtctgataaggctagcttaccaagtgctaatgggttcactacgagttgtgatagtgttaaacccgctttttcaatacatttctttaaattatgaatcattgtcttgggtgcggtgaacaaaattccgttcatctcaagccgaacccccatcattccgcgtggatctttaatcccatcaaacccatcaaccgtaaacgattgcggtaagatattgaggatttcacgttcaggtggtaaattccgaaccaatgcggcactagcaacgtcttgcacatcttgaccagtaatttccttagattgatcagagaccgcaatcatcccttggcattcttcgatttgtagttggttggctggaattccagcaacaacccgattaatttcaatatttgctttttgttctgcttgttgtacggcttgttggatagcggtaaccgcttgatcaatgtccacaatcgtcccgcgacttaatccgtttgatctagctgatccgacgccaatcacattaagttgtttattaattgattctgcaacaattaccttaattgaagtagttccgacatcaagaccgacatatatttttgaattctccattaagtgtgtggaacctccttgcattcaattagaataaaatgattcctatgctaaatagtaccatatttcgactagatttagaaagccaatccaatctttttaaacagtgttaactaattttttattgaatcagcctcagaattatcaaataatttggcgtaagcgccaacttctaagtcaattcgtcccttaccgtccatttgtttcgccagtgtgggataatatttaattttcttggcaagtgtccgcaaatccccaacaacctcattaccatcattcatatataagtgaacttgataaggattattgttcttagctgttaaacgaatttccgacacagcactttgaatgctgtttggaaaagcttgatatagttttaacccttgctttaagaaggcgtcatttttaaattgactatagacagggctattgccgagagactgcgtcattttcgtctttaaaatcgtgccattttctaagattggataatattgtttatgccgcactagatagcccaccgtaggatattccttaatcgccaatgtcagttgattaaactgatcaactttgacatttacgcttttcaccttaggtagtttctggtgaatccgcttctcaatcgctttttcctgccagatttgtgtcaggacgttatcgccaatccgtacgccactcgcattaatcacctgttgatcaggcactgatttagtcccgttgaccgtcatttgttgaacgtcgctaatcggcaacataaaatagattgccacacaagcgcccaatgtgaaggtgctcaataacgctgtcaaccgccactttgtctttgccgttcgttgcgcttttagatgtggtagttgaccactaattgttggtcgcccaggcgttaatcgttgccgacgttgtttcttccaacgctttagttgataagcgcgccaaacgtttagtaattggagcggatcgagcgacccatttttagttgtttttttcttcaagtcatccgcccccttcttaacttagatgatagtattaatcacttcaataatgcgatctgaagcgtctggaatccccattttcttagctgctttagccatggcttgttgactatcaggggttgcaaaaagcgtatctaatgattggactaatttgtcacccgttaattgtgcttctggaattaaaatcgctgcgtcttctttaaccaaactctcggcattttttgtttgatgatcatttgttacataggggcttggaatcaaaattgacggaatcccaagtgctgtgatttccgccaaactcgtcgcaccagcacgaccaacaatggcctttaaatctggtaaaatttcgggcatgtcgttgatatatggtacaacagccaaattatcattgagcgtcatcgcctttaattgcgcttgaacgtcatcaaaatgaacccgtccagaaacgaatagcacctgatactcttttgtattaagtgctggtactgcatcgataaaagcttggttaatacttggtgcaccacggctcccaccaaacacaagcactgtcggactgtcagtcttaagcccgaattcacttaaacgttcgtttggtaacattccagcaacttgttgggcccgcggattgcctgttaatacaattttgtgcattgggaattggtcgctgactgattcaaaggaaatggcaactttatcgacaaagcgcgccaaaaagcggttggtaaccccggctgctgagttttgttcatgaatcaacgttggcacttttaagcgacttgctgcatacagcaatgccccagaaacatagccacccgttccaatcacaatatcaggtttgaatgttttaatcatttcttttgcctctttaacactgcgcaagaaaagttgaattgttttaatatttgttttaatgcccttcatattcatcgaacgtttaaatccttggatttctaacgtcttaaaatcgatgccttgatctggcacaattttactttccaaaccgcgtttagtcccaacatataaaacggcatccaacaagtcgcgttgttgcattctttcaattagggctaacgctggatagatgtggccaccagttccgccaccagatatcattactctcattttagaatctccaatttaatctgtaatttgttcgactgccttaataaagacgtccccacgttcttcaaacgtcttgaactgatcccagctcgcacatgcaggcgacaataaaaccacgtcgccggcttcactagcagcataagcttcaggcactgcttctgttaaattatcaactattttgatgacgggaatacctgcttcgcgtgctgtctgtgccaataattgtttggtttcaccatataagatgattgcttttacgtgttcttttagtagtggtaataatggttcgaaagtaaagccccggtcaagaccacccgctaataaaacaattggttgtttaaaactcttcaacgcgacttcggtagcttccatattggttgctttagagtcgttatagaagcggcgaccttcatagctcgtcacaaactgcatccggtgtttaacgccggtaaaggtcgttaaaacatcaatgatcgcatcgtttgattggcccatcagcttagccgccgcaattgcggccaaagcattttcaatattgtggtcaccaggaacgttaatatcagtcactggcattatcacttcacccttaaaacaaagttggccatctttgacataggcgccagcttcagagttgcctagccgtgaaaatggcacaacttgcgccttagtttggcgactcaattcacgtagttcaggtaagtcccagttgacaacaaaaaagtcgtcagccgtttggttttgaacaagtcgcattttcgcagccacgtaattcgcacgcgagccatgataatccaaatgtgcttcataaatattcgttaaaactgcaatcttaggtttaacggttgttgtaccgagtagttggaaacttgataattctgtgaccatcacatcggcagccgtcactttttgggcgaccgcacttagtggaatgccgatattgcccgcagcgtatgcgtgcccctgggtgcgattttcatctaacatcaacgtaattaacgttgtggtagtcgtcttcccgtttgaaccagtcacactgacccattgggcttcagacacttcgtatgcaagttctggttccgttaaaactggaatcttgcgcgcaatcgcttctgccaccattgggttatcgtaacgaatgcccggatttttgaagaggtatgcaaagttgcgctcaaataacgccaatggatgcgatccagtaatgacggttgcccctaattcacgcaattgtgcaacttgaggattgtcttcttgttcctttccgtcattgacggtcacaatcgcccctaattttaataacaatttagcagcattaaagccgctcttccctaatcccaaaactaaaactgcctgatcttgatacgtcgtgctggccttcattaaattcgccctcttctaaaaaattaacagataaattgctgaacagatgatactaaataaccaaaagctgatatcaatccgccattcactccaccctgacatttcgaagtgatgatgaatgggactcattttaaaaatccgcttatggaataacttaaatgaaccgacttgtaacatcacacttgctgtttcaatgacgtatactaacccgaccaatagcagtgagaactctcgatgtaataaaattgacatggctgctagtgcgccaccaagtgctagtgaaccaacatcacccatgaaaatttgcgctggttttttattgtagattaaaaagccaagcaatccgccaataatgctgaggccgaaaatggcgacatcaatttggttttgatgaaaggcgataattgtataagttgcaaatgagatggttgccaagccagcaactaacccatcaatgccatccgttaagttcaccgcatttgagaaaccgactaaccacactaagacgaatatacaaaagaaccagttacttgaaatagtgccaattactgggatttcaagtgcagtactgaagccttcatggaaataaacagcgatgaagacaatcccaccaataatttgccctaacaatttttgccaagcgcgtaagcctaagttctgtttacggaaaactttaataaaatcatctgaaaaaccgagaataccgtataacaccagaataaacatggcaattaatagactattcgttaactgttttaagaataatcctacccaaatacttgaaacaacagcggcaataatgaataagagcccgcccattgttggtgtcccatttttcttagcgtgccatttggggccttcttcacggattgtctgcccctcttttttaaagcgtaaatacccgataaaaagcggcataaaaatcaccgtaattacaaacccactcattaagggcactaaaaattgtcctgctgccatttcataaactcctttaatccaactatcttattttaattgtacttttatttttttaaccccatctagcaacccattgaccgctaggctttgatgataagcatatccgctacctttgatgtcaatctcaacacctgttaattgcgcgagcttcaagaggtcatttttcgaccaacccgtgacatctggcatcgtcattgccccattggtcattaaaatgactcgctgtttaggtaaaatcacactattggcctttggtaattgctggacgactaagttcccactaccaacagaagcggtttgtaggcctaaatccgttaatttcttttgtgcttcatccgttgattgaccaatcacagacggaactgttacttgttgttgtgtgtctttttcagcctttttggtatactccagtgcccgtttcatcattggattgaagacctgtgccaaaatactttcagcactatctgtcatattctgcggctgtttcattgtgatatataaaatatacttaggatcatcagctggtgcaatccctgatacagagaagatataattgcttgcgccggttaaatagccaccgtctggaccagtaatttgtgcggtcccggttttaacggctactttataatctggaatttggtaaacctgacccgtcccataatcttgataaacaacatcttccatattttgtaagacagatttggccgtgctagccttaattggtttaccagctttgattggttttacttgatgatcctgattaatcccagataaaatctgcggtttaatcattgtgccatcgttcgcaatcgcacttgtcatctgaagcatctgcattacattaacgttaatcccttgaccaaatgaagttgtggcctgatctagtggccgaacatattgcaatgtcccctctgtttcgccgggtaattgaataccagttggttttaagaagccaaacttctgaatgtagtctttccaaaccttaggacccatggcttgttcaagcttgaccatcccaacgttacttgatcgtgcaaaggcttgactcagcggaatcatcccccagccactcgtttgccaatcgctaattttcttatcgccaactccaatcgaaccggattgataatactgattaagattgtaattaccagagtcgatggcagctgccaaggttgcaattttcaaaacagagcctggttcatagccatcttcaactaatgtatctcgccaaatcttgccaattccctttttagtgctggcattaaaggttggtcgttgtgaagccgccaaaatttcacccgttttagcattcatcaagacggcattcatactcttaggcttatattttttattgacactcgttaataaagtttccatgtatgattgtaaccgagaatctaaggtcaagtaaatatcttggccgtttttagcggcttttactttgtttttcttttgattgatcgtgtatccataggaatcacgggcaaaattcttgtaaccatcttggcctgctaattgtttgttgaagtatttttcaattcccattacaccaacgaggctttgatcagcgccgtcttcgtcctttggtgattgagcgataccaatgacgtgagatgcgaatgttccattagggtacagccgcgtaggggactcattgaagtaaataccggttaaatgttctttttcaatcttccgtttgatgctcagtgaaaggttttggccggcacttccgaattcaacttgataaactgaacggttagctggcgttaattgtttatagattttttcttcactcaatggtagatagcgactcaaaactttcgctgtttttttcttatcagttacatataacggcttcttattaggaccaacgtaatcgtgacttaataccgcatacactgaataggcgttaatgtcttgtgccaaaacgttccctaaagaatcataaattgtaccgcgttgtgcgcgaatcacggaatcagctttgtattttttctgtgattgtttcgttaaatccacccctgcaatatgcccagtagcagcaatgtaagcaaaacgaccggcgaaaactagaaaaatcgccgcgataattagcaataaaagcctgccaaaaacgcgtcgattccgccgtggactcttacgtgtcttaactgatttcatttagacacgttccgaatattattttcatttagtttaagatcatgtttctgggcaaaagcattcagacggtcagagcttgttaattcaccgatctcctgttttaaatcattattgttagcgctgacttgggccatcttttgagtcgtactttctaatcctcgttgtgcattaacaactgcaattttggtggttaacaaactaaccaacatcgcgaaaaagataattccaataactgacgtcgctaatttttcaacagctgaaaaagccacttttttagactggcttgcaactgcttgtttgtgtgcagtaggctgcgtttttagcggtgctactggcgtttctaattggcgtgccgtgttagttgccatcatcatcaatccttctagtcaatttctttttgtttttctgcgacacgtagcttagcgctatgtgcacgatggttttcttctaattcatcatctgttggtagaatcggcttgcggttcactaattttagaaccgttttttgttcttctggtaaaattggtaaccctttcggtaaatctgggagcgttgcttgctccttaaacatcgtcttcaccaaacgatcttctaatgattggaacgtaatgacactgatccgcccgccgacattgaccaatggaatagcttgttcgagtgaatcttcaattgcccctaattcatcattgaccgcaatccgaatcgcttggaaaatccgcttcgctggatgtccaccctttcgtcttgctggtgcaggaattgcttctttaatcaaatcagctaattcgattgtcgtttcaatcggcgcaactgctctttgttgttcaatcttccgcgcaacttgttttgagaacttttcttcgccgtagcggaaaaagatcttaattagttgttgataggtccactcattaacgacattgtaggcactgagttccgccccttggtccattcgcatatcaagtggggcttctttcttataactaaacccgcgttgggcatcatcaaattgtggtgatgatacgcctaaatcgtataaaataccatcaatcttagtcacaccgtgttctgctaacgctgcttttaaatagcggaagttactcttaataaaagtcacttggcccgcttcagcatatttggctaatcgttgtttactacttgctaaggcatgatcgtcttggtcaaacgaataaagatgaccggtcgtcagctgagataacaaatattcactatggccgccgccccctaatgttgcgtctacatacacgccatcgggttgcacattcaaggcatcaaccgtttctttcaataaaacactttgatgtttaaatgtttctgtcatctatttaccatccttctaaaaatcaaaatctaacatattttctgcaatatcatcaaaattctcttcagcttcttcgctaaagctcgcccatttttcctggctccaaatttcaatgcggtttgagaccccgattaacacacattctttttcaagaccagcatgtttagcaagtgtgtctgggatattcacccgaccttgcttatcaggggaacattcgaccgccgctgagtagaaaaagcggacgaacgcgcgggcatcttttttagcgaggggcagtttttttaacttctcttccaactgttcccattcactaagggggtaaccaaaaatacaattgtccatgccacgggtgagtacaaattccgcacctaatgattcacgaaatttagccggcatgattaaccgacctttcgtatcaatcgtgtgatgaaattcgcccatgaacataaccattcacccctttgcccaccttaactgattttagtctaccacaatcccccactttctaccacattttgccaaaaaaaaccaaaatcttatcattttggaaccaattgtacacgatatttatattactagcctttttgaccaaaaaaaacagccatttcgttaaccgaaatggccgtttcacttgttaattaagtaagcttattttgggctgtcgcaccacttctaagcaacgccgcaaaaaattgctcactttaatctaatttttagaagtttaaaatgccagttgcagcgagtgaaccaaaaatgactgagcccactgtggcgattaacattacccaaacgaaaattttagtaatgcgactaaacgtgcttgtttgtttcttcaattattccaccacctagacttttttcttatcagcagtttacaccgaatcacttgaaagtgcaactcagtcctttttatcttttccaaaagacggtacaatgggactattaactttcgaggtgatttaaatgccatttagcacaacacttttctttgcaggcttaccgcccgtctgtgtcgcactcggctactgtatcgaccggttgactcagcgtctatttaaacatcgttttcattatattaattggctaccaattccattgctagtaagtgctatctttctgagtatgccaattttcagtaaagctggctggttcttttgcttagctatctgtctgtggggaatcatctggagcttaacgcgcttttactacgaccgtgcgctgtacctacgtaagtttctacggagttggtggcgctttgtcctcgtgatggccacagcatggtacctatcctttctaatcatcacactcctttaaaccaaaaaagcggtgtcgactctttcaatttgtcgacaccgcttttcttagtttaaaaaatatttccctaacgcgcttaattgcgtaattgtgattgtcggttgcaccatgattggcaatcgatcaacatcgaaataggccgtcgccacatgggcgttaatccctgcttcaatatctaatgcacgatcaccaatcatcacggttttagttttatccagctgataacgatcacataaatcgttcaaactatctggcgccggtttcctggcaaatccgctctgactcgtaacaatttcagtaaaataatccgctagtccatgcgctgccaaaaatttttctgcagcatcatcacgatgggtcaataagaaattctgaccatgtgcactaatctgtttcaaaatcgccgctgcccccggataaggttgtggcgtctgttgtaattggtgttctaattcatgatattctcgatccaattgttcaaatgaaacattagtttgctgagcaagcatctgcagttcccgtttaattgaagtctgcttaatcgcttggtataagtgcgattgatcgactgcgacttgatgatcacggtaaacctgactgagcgccgtcatcataacaggataagtatcatacaatgtaccatcgaaatcccaaatcgcattttgataactcattaattatccattctcctttgtatcaaataggatagtgactggaccgtcattgaccaaagctacctgcatatcggctccaaattctccagttgcgacgcgaatcccagtcgctgctaatttttgattaaactgttcgtataagcgtttagcatagtccggtttcccagccgcagtaaagcttgggcgattgcccttcttagtgctagcaaaaagggtgaattgtgacaccgataaaatggcaccgtcaacctgggccaacgccaaattcatcttgccatctgggtcttcaaaaacgcgcaattgactaattttcttaaccaagtaatctaaatcagcttcagtatcatcatcacaaataccgaccaataacaaaaagccttggttaatcttgccaacaatcgtctgatcaatcgtgacacttgcttggctcactcgctgtaatactactcgcatattaagtcgctcctatccttgaacccgtttgacttcgtaaacatctgggatgttcttcacggcttccataatcgtttctaaatgatctgtattgcgaatgccgactgtcacatgaatatccgccatcttatcgtgatcaatccgccccatcacgttatttagctgtttcgtatgtgcatttaaggactgtaagacatcgttcaatagtccaccacggttatagccgtagatttccaaattcgcatcatagagttgatcattcttagcgttggtattttcccaactgacttcagtcaatcgactgttcatatctgcccgatcaacgatattcggacaatcgcgccgatgaacagaaaccccacgtccctttgttacatagccaacgatatcatcaccagggactggattacagcatttactcaagtgcactaagacattgtcgacaccttcaataacaacaccgtcttcatgtttgattgtgatatggctaccatttgctttaggccctggttgttgtgaatccttcgctgatagaatctcagcttctaatgctttttgttcactttcttcttttgcccgtcgttctttaatcgttaagcgattgacgactgactgtggtgagatttcaccgaacccaattgctgcaaacagttcttcttcggcattaaaattaaaatgtggtaggatgacagctatctcggctttagtgaggtgttcttttggtgtataaccatcttctaccaacagatgttcaacagccgtccgtcctttttcgacgttttcatcccgatcttcttttttaaagtagcgcttaaccttattccgagcacgcgcggtgaaagcgagcttaatccaatcacgacttggtgtcgcacttgttgacgtcaacatctcgacaatatcaccattacgtaattgatagttcaacggtacaattttgccgttaatcttagctccaacagcgtggttcccgacttcagtatgcactaaataagcaaaatccagtggcactgaaccctttggtagttcataaacatcgcctctgggtgtgaaaacataaacgcgatcgctaaagatatcgcctttgacgctttccataaattctgcagcatcatcggaagcatcttgaatttcaagaatttcacggaataaatcgagtttacgccctgattcatccagcttaatctgttccttaacgccttctttatacgcccaatgtgcagcgaccccatattcagcaacatcgtgcatttcttgcgtccgaatttgcacttcaagcggtttgcctttgggaccaatcacagttgtatggatcgattgatacatgttggcctttggcattgcaatgtagtctttaaaccgaccgggcatcggtttccacttagtatggattgctcctaaaacagcatagcagtccttgattgagtcaacaacaacccgaattgcgagtaaatcatacaattcttcaaattgtttatgctggtcgcgcatcttgcgataaatcgagtaaagatgctttggtcgtccataaatgtcgtaattcatatctaaatcagcaattgagtctttaatgtcttcaattgcttcttgaatataagattcgcgttgtgtccgcttagaattcatcaggtgcacaatccgatagtactgttgtgggttcaaataacggagcgaaatatcttccaattcccacttaatcttactaatccctaaccggtcagccaatggtgcatagatttctaatgtttcgttagcaattcggcgttgtttttcgggtttcaaatgtttcaacgtccgcatattatgcaagcgatcggcgagtttgaccataatcacccgcaagtctttagccattgctaataacatcttccggtgattttcagccagttgttcttggtgtgatttatatttaatttttcctaatttcgtgacaccatcaacgattaccgcaacatctttgccaaacatctcttcaacatcacctaacgtgatattcgtatcttcgacaacatcgtgtaagtaaccagaagcaaccgttgcgggatccatcttcaattcagcaagaatccctgcaacttgaattggatgaataatatacggttcacctgattggcgaacttgttctttatgcacataagctgcaaaatcatacgctttttggacaaaagcaagatgctcagtattcatgtatttctgacataactgtagcacttcctgctgtgaaattactttttcttctggcatcctgcctcactccaattcctcttactcgattaaaaatgtactgaatacaacaaaactgactcaactaattaactgtcgagtcagtttgcttaacggcgttcatacgcagtattaattcctaagtaacttaataaacaataaataggaacgaaccaatagttataatctgcgtagcgcacaaccaccatcaatccaaataaaatcggcaggtacaaaatgtgataccaagctgcatgggtcttttgaacacgatacccaatcataaaggctgcgcaaccattgacagccatgaatagcagtccaatccgccacgttttatcgatgtgcaagacaccaaacactagcggtaaaacgaccgccaagagaatggccactaataaatagcgtacccaatccatttttaaataacgattattcataaatttagtcatgttgtgcccctctgtaaaaagattacatctatcatactataaagtagccaattctgtcacatacgaaatcgcacttaacagatataacggcgcggtctcggcccgtaaaatccgtggtcctaaaccagccatcttaaagccagccgccgcaagcatctcaatttccttgggcgcaacgccgccttctggaccaaaaacacaaagtaatcgatccccaggttgggctgtttgtaagctctgaactaattgggcatgctcaccgtctttagctgactcttcgtaagccactaatttaatcgtcgctgattcttgtgcgaccgccgttaaactgttgcgccattcaatagttggtacatgcgtccggtgagcttgttcggctgcttcttgcgcaattttttgaagccgcgcaactttcttagcttgttttttatcatcccagcgtgcgactgagaattggctattacagaaaataaaccggtgtgcacccaactgcgtgcctttttgaacaatccagtctgttttgtcaccctttgacaagccgcatacaatcgtcgtctcaatcggtaattcaactgattttgtaattggcgattgcaccgtaacggtgactgttttgtcagttgcatccagttcagttaattcaccgatgaatgcttgttcatccggcgttaccaattcaacacgatgaccaggctgcatccgcatcacttttagcatatgatgtgcagtttcacccgttaaggtcacttgttgttctacttgaattgcttcatcaataaaataacgttgcatgccatactcctcttaatcgtcgtccgtcttttggcgtgtaatcaatgccacccagtcacccatatgaagggcttcttgaacaacaaaatcattcgccgataacgtttcacggacaagtgcttctttatctgcaataatgccggccagtaataggtgtccattgtcattcaataaagccttggcttggggaatcaagggcacgataatctctgctaagatattggccacaatcacatccgctttcgttgtaatcccgttcaacaaatcgttgggatgggcatcaatgccagcagtcactgggttgagggcaaaattttccttagcggcatcaaccgcaacttgatccacatcataggcgcgaatatcattgacccctaaatgcgcagccgcaatactcaaaaccccagagccagtcccgacgtcaattaaagattcaccgccgcgtagaaccatttctaacatttgcacggatagatgggttgttggatgcgttcctgttccaaaagccatccccgggtccatccgaatcagtgcttcgcgttcatcagtcggttgatagtcggtccaacttggcacaaccgttaagaagcgagttagccgcgttggttgataatatttcttccaagctgtcgcccaatcatcatcggcgacttgtgccaatgtcaccttaccagaaccaatcgctaacccaaagtcagtcaattgggcaacgcgttgttcaatcaacggtaatttttccggcacaaaaactgtttctgggaaaaaggcactcactgcagcacccgtttcaaggtggggaatactgtctagatcaataatttgatctggctttgcctttaaatgttcataatcagctgcgtcttcgatttggattccttccgcaccattttccgttaaaatattggcgattgcttccactgcttcattaacagtagcgaccgttacttttgtccattccatgtagcatgtctccttcttaatgcgggttgcttagtatttagggtaagcgtagtattttttcgctaattgatcatctgcttgagcgacagttgcttggaaaacagtgtcatcccagtttaagataaaggtttcttcgtctgattcatcattcacaaaagcggctaattgatcttcgccttcatctaataagtcttgtaaatagttgaaaaagccccgaccgacttgtgcgtttaaccccttgcgaccagcaaatggaatcactgctaaataattgtctgcatattcaaagccgtccatcttactttcatcgaagaataaaatcgcatcttcataactgatttcatccgattcgttcaattcaccattttgatcttcaacggcaattgcttgttccttagtcacgtttaatgtgaattccaattcaatcgcccgagcttgtttgtcccagttgatattcatatccccactaaattgtaaatcatctaattctgcatcgaaaaatgctaacatatccatttcagccactgtattcaccatatccttttaattagtcgttatttaagtcaattttaaagttgaacgtattaacatcatacctgattatgacttgaatctaaagcaatcattcaaaaaagcccagaacaaaatgtcccagactttcaatcgtaattctacttaatgtgctgcttggttctgaccccaataaataacgtccatactctgatcgtcataacgttggaactcaattccgagtgctgcatcagattctgccatcacacgaccatatagccgcatatcagcttctggcgtgttgccatctgggcgaatggcatgcatcaacataaacttagccatttctgattgtagatgggcttcaatcggggccaacggatcaaaaaccatcgtgacaaaccgaatatcactactatcgccatcaccaattaattcaacaatcggaaacccaccaaaattttgttgttgttttaaataagccaataactggtcaatctgttcttttgtgaaggctgatttataaaagaggaaatgccaagtttgtcgtttcatcgtgtcacccacccgttatttattacatatagtatgccatactgtcaccaacaacgcgaacttagtctttttttggtaattgattcgattttggttggtgatatgcctttttcaagccagcaaatgtcgcttgaatcttttggtaatgcatttcatcgttacgcgcatgcttcaccaactgggtaaaatcgtgggactgtaagtccttttctgtttgttttttaaaccacaacatatcatcactccttatgtaattttattatacaacgaaacgttatcattgcagtcttaaatttacttttaaaccaaattgccgtaaactaacactattcattaaaggagtctattatgggaaagaagaaaaagcaaaacgcattatccaaaacattagttgaaaaaattctagataaacaaaaagtggcctacacccaacttgaattcccaacagaggaagtccacaacgttgcccaaatgaaggtcgatcatctcgatatcgatgaacatcttatttataaaacattggtgctctctggtaagagtaccggcccaatcgtcggtgtcgtcccgattgattgtcatttagacgaaaaaaaattaagccaaatttctggcaacaaaaaaattgcgatggtcccattaagggagctcgtggccactactggctacgaacatggcgctaacacgcccgttggaatctgggaacaatcccactatccgatttacattgaccaacaggctgaaaaggaaccattcatctatgtctcatccggtaaaattggccgctcaattcagattaatccgcaagacttacagcgggtcactgaagccacctttgctgacatcagtgaagcctaaaaatatgataagaggggctagaacaattcacttgttctagcccctcttatttttgagtttaatctaagtattgggccaaattagcaccagaaatgatgacttgttccttcagcaaatttggttctttaataatattatgaaccaccgtttcgggtaaaacatcattttgtgcgagcatttgcagagcatcatcttgcatcacgacttttttaaccatattatgtattttaatcgttgcaacatatttttgcgattcccgttcttcaaccacttcgtagttgccgtaataatgtttatctgtcattaactcatccccttaaggttaataatatcatatttcaacaaataaaactaagtaacttatcctataataaggggaaactgttaaaaaataccaaaaaaaaagcaaaacaataactgttttgctttttccattatagtaaggagagtacaggatttgaacctgcgcgccggtataagccggttcgacggatttcgagtccgttgcattaccactctgccaactctccagaacgttattcattataacagacttctaaagaactgaacagcgtaaaacacaaaaaaacctacgtgcgcccacattctattcgatcaccaccatcccatcttgatcaaattgccagtcctttgagtaagcgacttcccaatagtaaccatcgggatcactgaaataaccactatagccaccccactcgccccattctggcgctttgatgagcgtggccccgttagcgagagctgttttaaatgttgcatcgacttccgcttgactatgcgtattaaaggcatggatcacgccgttgaacgttcttggaaatggatgattatctgcggataagccaatatcggctagtagtgcagtgtacggaaacaattccaacttggtcccagtattattgaaaaagacgattgtctcagcattttctaaattcggcgcttgaaagccgagtgcttggtaaaactgacgtgacacggttaaatcctgaacacctaaacaaattaaatggatactattcatcaaatcacctactcgttttaaattaacctgattgtatcaatccgaagctaataacgcaattttccccgttaattgaccaattattaaatttattgaatcatatttctttttataaaaaaattcgttatacttaaagaatcttaaatgatagaggtttattaatatgaagatttcttatcgcaaactaccgtttttattcaacttaattttcttagttgtaacggttttacaatctttgatcattctagtggttaacccccacgttacgaaattcatccccacttatatggatgccatggcgaaagtatggtggttgtgcattattgctattattttgcatattgttgcttatttattatcactcgatcagaatttgattttactggcatacttatgtgcaatcgtcgcttacatcatcttgattttagtccctaatttattactagttgcccttttcttgttagtggttagcttgatcatttcatttaaagtctatcatttccattatcgaacacctgcttagtcctcgtcggagggctatttttttatgcgctaacccatttaatttatggtataattagtttgaaattaagacaaaagaggttctagtaatgaaacgactaactgcgattctatctttattggtactttgtttactgccttttgtaagcccttacttcttcggcaaaggcatgcgcttttctagtaatcatcaaaaaaatccaatccgctttgaagtttgtcggcatccaaaggtccaccacgcagtcgatcgtgatggcagtgaacaaaaattaaacgccttcaaccaccgctgcgaacggttctttaatcaactcacacttgcgcctgaagcattctacgccgtagctggatttcttggatttaccgtctttattctattattagaaccactacttgcactcctaatgaccctcaagaaagtgccacaacccaaaaaggcacaatcccatactccgcagaagcatcagattgcgccttataagtggcatttattagattagtttaagttcaacttttgataagtataatggccctcttttagtgattgattcgcatatggcgtctcattgagcaacgccacatattcttgggcccgttgttccgaactaaacgcccggatcattttacttttatcataataaagtgggtttgcttgatataaaacaacgtagatccattgattcatctgtcatcacctaactttgtaatccacataaagaaagaccaactcgtaatgagtcggccttttttaatgtcatcttaacgacgagcttctttgatacgagctgccttaccacgtaatgcgcgtaagtagtataacttagcacgacgtacacggccatgacgagtaacttcgatttgagcaacacgtggtgagtgtaatgggaaagttctttccacacccacaccgctactgattttacgaactgtgtaagtttcactcacgccaacaccatgacgtttgataacaacaccttcgaataattggatacgttcgcgagtaccttcgacaacacgcacgtgaacacgtacgttgtccccaggacggaagtcaggaatatctgaacgtaattgagacttagtaatttcttgaattaatggattcattttgaatctctcctttttccacagatattcattaacgtcttgcgccagcggaataccgttgttttgtgactaatcatcacaatttttaattttagcataattcaactgagaataaaagccttatttttcagccgcttcttgcttaatttcttgtaaccagtgcaactgatccttggtcaacgtcatcttctctagtaagtccggacgccgttcatatgtccgtttcaaggacatcttctcgcgccactcgttaatgagcttatgattcccgttcatcaagacttcaggtacctttaaaccgcggtattccggtggtcgcgtatattgtggatgttccaataagccggtcgaaaaagaatccgtaaccgctgattgttcattccccaagacgccaggtacaagccgcgaaatggcatcgatcatcaccattgcgcctaattcgcctccagtgacgacgaaatcgcccaatgagacttcatcagtgactagcgtgcgaatccgttcatcatagccttcgtaatgcccacagataaaaaccaagtggtcttcttgagcaaattcttcggcaactttttggttaaacgttaccccagctggatcgagcaaaataacccgtttgtgccccggattcttggcattcacttgatccatcgcctcaaaaatcggttgtggtcggagcaacatccccgcacctccaccatacggcgcatcatcaaccgaattgtgtttattgactgaaaaatcacggaaatccgtcacttctaaatcaattaagtcacgatcaattgccttaccgataattgattgggataacccattttgaaccatatctggaaataaacttaagacatcaatcttcattatcaatcaatccttctggtacttcaacgtaggctttacccgcttcaatatcaattttcttaacgactgacttcaaaaatggtaagagtaagtctgaacggccacggcgcttgattacccagacatcgttgggacctggatcgatgatttctgagactttcccatagctggtcccatcggcttcttcaaccacttctaagccgataatatcaccgtagtaaaactcatcatcttccagatcatcttcacgttgacttgcagcaatctttaaattatgacccttgaactgttcaacatcgttgatattgcccattccttcgaactgtaatagatagaattgcttgtgttggcgcattgccgccactttaacatcaacaaggccattgggcatttcgacggccagttgcacgccttttttaaatcgtgaatccgtaaagtcagtcgtcgcaatgacccgcacttcaccacggatgccgtgggtattgacaattttaccaacttgatagtatttttctggcatttaatttctccttaatcgacaaaaaacgcctaaataaaacatctctgcttcatttaaacgtttttgttaggcatctacaatatttaaacggatccgtttttggtatggtgctttcacactatagacaatggtacggatggactgtgcaacccgtccctgcttgccaatgacgcgaccgatatcacttggattaacctgtaagtcaaattccataaaacgttctgtctcatgttcagtcaatttgacgtcttccggatgttcgacaagtggctgaacaattgcaataattagttccttcacgtctgtcataacgaatccctactttttagcgaagcgtgcttcgtgatatttttgcataatcccttgttttgataaaagattacgaacagtatcagaaggttgtgcgcctttttgtaaccaatccatgataacttcttcttctaacttcaagtcaactggttctgttaatggattgtagtaacctacttgttggataaagcgaccatcacgtggtgaacgtgaatctgcaacaacgatacggtagaatgggcgtttctttgaacccatacgtttcatacgaattttaactgacattaatgccacctcctattaattctttaacatgtcataatataccaaatttcaaacgccgtgtaaagtgttttttctttacaggacaaatttttttaagatttaaaacgacgcgcgtttttgagacgtttcttcttgtttttcttttgttttttcatcattgaattcatggccatcttacccattttacccttgataccgttgcccattaaaccttccatgccgttaaagttgccctttgacatttggttcatcatctttttcgattgattgaattgtttgatcatccggttaacttcaacgattgggcgaccagcaccagccgctaaacgacgacggcgactaggattcaataagtcaggattttcccgttcttgtggcgtcattgattgaacgatggccttcatatgcgccatgtctttcggatccatcttgatgttcttgagttgtgggttattagccatccctggaatcatcttcatgatatcttccaaaggtcccatgctctgcaattgatccatctgatccaagaaatcgttaaaatcaaagctattttctttgatcttttcagccatatcagctgctttttgctcgtcataatcttgttgcgctttttcaatcaagctcaacatgtcacccatcccaaggattcggctactcatccggtctggatagaaaatgtcgagttgatcaagtttttcgccttgaccagtgaacttaattggtttgccagtgacggcgcgaattgaaagggctgccccaccacgtgtatcgccatctaacttggttaggacgaccccggtgacatctaaacgactgttaaagccttcagcaacatcgacagcggcttgcccagtcatggcatcgaccgttaagaggatttcatttggatgggctagctcattaatatcagccaattcttgcatcaaggcttcgtcaatttgtaaacgaccagccgtatcaattaagacgtaatcgttcttttgtaaggccgcttgtgctaacccttgacgaacgatttcaactgggttgacatccgtccccatttcaaagacttgtgcgtcaacttgcttgccgacggtcttcaattgttcaatcgcagctggccgataaacatcggcagcaatcatcaatggccgtgctttttcattttggattaaatattttgctaatttcccggccgtggttgttttcccggccccttgtaacccaaccatcataatgattgttggaatatgtggtgatttattcaacggcacagccgtttcacccatcatcttcgttaattcttcatcaacgatttttacaatttgttgtgcaggtgataagctatcaaggacttctgccccgatggcgcgttccttgacgactttaataaagtctttaaccactttaaagttaacgtcggcttctaataatgccagccgaatctcgcgcatcgcttgattgacgtctgtttcggtaatcttccctttacgccgaagcttactcaatgcgccttgtagtcgttctgttagcccttcaaatgccattttttatcagtcctttaagttaattattgttcggttaaattcagtaagtcagccaacaagcgcatcagttcttgatcgtctggatagtgcgcttgaatatacttttgtagcgtatctgcactggcattttgctgttcgtaattacgatagagatgcagcttttcttcgtaaccctctaagattttctcagtccgacgaatgttgtcatagaccgcttgccgactaaccttgtattcagcagcaatttcgccgagagaaaaatcatccccataatataatgagatataactatgttgttttgccgttaaaagtgcgccataaaattcgaacaacgaattcatgcgtgcgttttgtgcgagttccatttgacgcctcctagacttagtttgacctaactattagagtaccgattttaacgggcttagtcaacgttttattgcgcgatttaactagaagtttgtgcataaattatcttttcactggtataaacaaaaaatcatgctaaaatagaagtgtaagctttttcataacttaaattgaaatttctacggaggttgtatgatggcagcaacaattatctattggggcgttatattcgcattaattggttggggactctggaacttaatcttctcaatcgtctatttaaagaacaaggaaaatggtaatctttggttcttcgccattttaaacaccttaaccttattattcgggctattattctggtgggtcttcaacaatcacgcttggcaagaatactggttggttaaagcaaccgcaaccaacagtctactaggtggcgttttaatcgcctatgtcgtcttaattatcgcccaagtgattttgggacgcgaaccaaaagccaaaacagcttaatcattcattcaaaaaagcgtctgacaagaaattgtcggacgctttttcttattgcctattgaaataacaaatcaatataaaccgaaatgattagaagatctgcactgccacctaaactgtaatggccccgcgttgcttcgtgatctaatttcgttaatccttgctgacccgtttcagtttcgatcccaccagcagcaataatcgctgccgcttgcttttgaacatctctcaaggtttgtaaactgccgctacgcttaacaaggtttgaatcttctgaaacactaatgatttttattagtgtgttcactaaccgcgtattccaatcacccgtctgtgtctttaagtaagggtacgctgtttcaaatatggttggataccccgcctgtgcttcgccacggatcccaactaatccgtattgcaggtagagtttctcaccatttgttagccacgccggttccttttgactaagggccttgaaatcattctcaaccaatcccgccaacatggcttgaactgtttgacttaatttcagtggtgtcaatgttgatttttgcagtagataccccgtcgcactcaacaaaattcctagtgagaatatcgcccctttatgcgtattcacacctttggttgctgacaacatcgcgtcttccgctcgcataccaagcggccgaatttgagccattagtgctgttaaatccgattgctcaaacgtactacccacctgaacaaattgttcaaaaaacggtagtaacgcgacactactatcgataaacgtgaacagatccatatcggtgtgcgtttgatgatcgatgggatccactaaaccaggtttgggatagcagctcacttcatacaatagtgcacgttgcgcaagctgcgcgattgcttgggatgttttcatctaattcgtctccatcaataattgataatgttggttaattgcagcttgtagttctgccactgtatggcgtcgacttcttgcacaaacctttgccggctgatcacataacaagcatcggcgtgctggctgtccaaaatcttgccgactcacaggttgtgcttgttgcaaatcagcttgccaagttagcacatcgacgtcaaataaccggcctaatggatgctggtcttcaaaaataacagcgcgttgcttaatcttttctggtgagccatcaaccaccaaaaacgcttcgggacctgttggctgatcccaatcaatttgccgttgaattgttaatgcttgtttaaaagtggcaaagcctgtcttaaacagctgcgtcagtgccgcattattcttaatgggaccaggaatattgagcttgagtgtcacgacacttttatcggatgacgtcgaacgcaccaatttattttgtaaagccgcacgctgatcacgattggctaggaccgcattaatctcttgtggtgtgccagttgcaaacagattaatcatccgactagtcctttacttgatacacaacgtccattaaagtgccatcacgatactcaaccaaagcaactggcttatcggtgaaggctaatggtgttgcttgtccaacaattttagcggctttttgccgtaattcatcgatcgtgaacactggtacgcatggaatattgcttaatgcttcaatcaaatcatggcgtttggggttaatcgcaatccctaattcagtgaccaagacatcgattgaatcacctggcgtaacaacggttgtcacatcatcaacaatcgttgcaattcgtcctctgacaattggtgcagaaataattgttaacttcgcattggccgcgtcttgatggccaccgattgcccctcgtaaaacgccatctgaaccagtcataacgttcacgttaaacttcgtatcaatttcaagtgctgacaagatgcagacatctaattggttgaccgcagcccctttattataaggatctgcataccaagaagcatcaatttcttgttgattttcagtggttgccatactatcggccgcgtctttatcaaaatcctgcacgtctaagattttatccactaagccttcgttgagtaaatcaacagttggcttcgtaatcccgcctaaagcgaatgaagcggtaatggacttcttcaacattgattcgcgcaaataacgcgtaacagctaatgcagcgccacctgaacctgtttggaatgagaaaccttgtttgaagtaaggtgagtgtgtaataacggcattcaccatttctgcaattttcaattccttaggatccttggtaaagcgagttgcacctgaaccaattttttcagggtccccaacttgatcaacttttacaacataatcaacttgcgtttgcttgatgctggctggtgtattgggatatggcataatcgtatccgttaacaaaacaaccttatctgcatattgtgcatccatcaatgcatagccgagtgagccgaagacagcgtcacctttaatcgcgttcgcattaccgacttcatcagcattaggaacacctaagaacgcaacatcaatcttgatatcaccactttcgatggcccgtgcacggttcccatgtgagcgtaaaataactgggttttctaatccaccgtgtgagactaaatcccctaattcgccacgcatcccagaagaagtaatatgggtcaccacaccagccttgattgctttaacaaccatcttgttcatcacgttagtcagtgaacttggggctaacgttaagtctttaaaaccttggtcaatcaaaatttgcatgaccgcgttaaaaacatagtctccttcacggaaatgatgatggaatgaaatggtcatcccattttttagacccactttttgaatcacatcttcaatcgatgaaactaatttcgcgtgtccctgatcagctgttaccttaggggcgacacgttgaatttcaggatgaccgatttcaaccgtttcaaatggttggtaagccattgtttgcattaaatcatctggtaattcgcgttgtactttattcagcataccaatttccctcctgatcaactaaatgtgatgcttccgccaacatcatggtccgttgcgcacgcgccacaattggtttatcaaccattttcccatttaatgaaataacgccagagcccttaatccgtgcttcttcaatggcgtttaaaacgtcttttgcattttgaacatctttttcagttggggcataaatggcattcactaacggaatttggcgtggattaataactgatttgccgtcaaaaccaagttcgtgaatcaactcaacttcgtgattaaagcccgcttcgttatcaacatccgagtaaactgtatcaaacgccgcaatgccggctgctcgtgcaccatgaagaatcatattccgtgcaaatgaaagttctgcgccatcaggataacgatgcgtcttcatgtttgtcacataatcttcggcaccaattgcaatcccaattaatcgatctgaagctttggcaatcgctggcgcattcaagaccccttcggcactttcaatggctgccatcattttagttgttttagccggaatcttaaaataatgctcggcttcagcaataacggcttcggtttcaataacatcgtcaaccgtttccgtcttgggtagccgaatcacatcgacgccagccttgaccattgcaaagatatcagggcgcccaaaaggtgtttctaacccattaatccgtacgactaattctgtttcaccgtaatcaaccgtttgtaaagcctgcattactagcattctagccgcatctttttcggtaagtgaaactgaatcttctaaatcaaacatgactgaatcagcaccgtaaataccggcatcctttaacattccagggttattacctggcacaaacatcatcgtccgtcgcaaacgttccattagccaagcacctcccaatctggatcattttctttatcagttgcccgttgaatcaccgtgattagtcgcgctttaatggtgcaatctagcgcgcctttgtcgacagccttaattttgacatttgtaatgccgtattgatctaagatggtttgcattaaagtccgaatttgagctccaaattgtttttcaacagcactttctaattcgatttcagttgcaccttcaaccttagaaagcatgatttgaatatcactcgactctaacgttcctgcaattgcagtatgtttaatttccatcaacttgcatccctttctgaattctggcttgtaaactagcctggttttgcttaataaattggtaagttgtatctggtacaaaattttgaacggtttcaatcatgcccgcttgaacggcttgtctaacccgcgtggcagagataacctggtctgccgcctgtcgtcttggaatcaccttaacagtcacttcaggtggcaaattagtcgccaatgcttgattgtataatgccgttgttttggaaaatggttcttcccctaaaaagcgatattgaatgtttaactgtgccgcaatttttttaaataattgggcatccaaggcggtttgatatccaatcacatcttgtgattctggtaaaaagtaagcagggaaggtcgcataactaaccatatagtcgcttgttgggactaccaccacattcgttaaatccgcgaccccttgttgaacgagtttgaagcgttcggcggttgtaaacagcgagacatcttgactaaccacaaaaacataaacgaaatcactcgcctttgccgcctgctccactaaatagcggtgccctaatgtgaatggattggcattcataacaatcgcactaattgcggcttgcgtttgtttttgaacccttggtcttggtacctgtgcaataaattgttgtagcgaaacatcacccgtttctagcaaaacagcgacgtcagtttccgccaataaattaaacccgacaaattcaaagctttgtcgatattttggtttcgtaaacacaaagatgtgaaaaatacctttttgcgccaacgcgctaattaatgtcgaaataatggcattaaataacttgccatcttgataatgatgatcgaccgcaatgtactttagcacatttttctgataggcccccgtcgcaatgagctgctgcccttcaaaaataccaaagcacgcctctacatcattcacggtttggggtaacccttcaatcccctcttgtgtcagtaacgtgacccattgttgataataatgagtttctttcaaattaagctgtcttgtttgttgagaataatccatgtggcactccttctaagcgaataggcgcattaagaaaatagaaagggtaaccgtaatcgcaccacctagtcgaacagcaacttgtgcaaatggcataagaaccattcgatcgcccgctgctaaaatcgctaaggcaccggtcccaccttgtccgctacaacacgaaaccgcaattgccgtatctactggatacatgcctaaaagttttgcactgaagaaagctgccgttacgatccctgtgacagtcacaacaatcgtaattaacattgggacattcgtaaagaccgtaatcaatgaattccaaggcgtcattgcaaccccgaccccaaacaagagtggcggtgtaattccctttaccgttaaactatataatgaactcccaccagcttgtaaactttcaggaatccagcctaacattttagcagccatcacgacaattaataacacgattggtgcgggtaaatgaatcacgctattgacccacactcctaataggtaaagggcaactgctaaaatacctgatactaacattttttcgatatcagcgccgcttgttttttgtgttaagttatcaagtcctgattcagcttcatcagtatctactaaacgcccattccccgttaattcaggatgaacgtcaccgatttttttcaaaataccggctaagataacggcaaccaaactccctaacatgacgcaaggtagaatcatcgcaaaaatcttaggttgcgtcatcgaaataattgctgcgtaacccagtgataatggcagtgccccttcaccgacaccaccggccataatcggtgcaacaacgtaaaaataactcttccatgcagaaagacctaataacgttccgactgcgatgcccaaaagtggcccaactaattcacaaatcaataagacaacgataattctagtacttgccttgattaatgttttccggttcatcgcgctaatactaccaacgattaatagggcaataaagaaagctaagaaattatttcgtgtcataaaatctgtgacaacgtgcacggtacttttaggtaaccagttttgataaacgaggtatgagggtaagaatgtaacgactaataccttaccacccaatgatttcaagactggaatgtgtttcccaatttcttcaagaataaatgagaataatgtcatgacccctagcgcacctaacatatcgttaggcatctggttattcattgttaatagaatgtaaccaagcgctagtattaaatatagcggcattgggataatcccaatgtgtaatgcaataaatttctgaaataaattctgattgttgatagttttttttgcttccatcactaaaaaccccattctaaatcattatttatactgctttactgcttctacaaccgtattgacaacaccttggtcaaaaacccctgggacaattttttcattcgttggtgcttgaatcatattcgctaatgctttggcaatttcgccttccattgctgtttcaaaatgtgtaatgtgattttccaataaacctttgaataaccctgggaacgccaagatattattcacttggttaggataggccgaactcccagttgcaatcacagcagcacctgcttttttggccaattctggatcaatttcaggtactgggttggctaatgcgaagataattggatctgtcgccattgattgaaccatctcagccgttacaagctccccaacggataacccgattaacacatcttgatcgactaaagcttccgctaacgttgttgcatctgtttctggttgaaccgcttgaacaaattttaattgataatcattcaaactggtttgttgatcacgaatgacccctttttgatcaaccaatgtaatgtgttgaatcccaacgctcgctaacaatttagcggttgctaaacccgaagcaccagcacccgtcaaaaccactttcaaatccgttaacgatttaccaaccactttcgcagcgttgattaaacctgctaacacaacaattgcagttccttcttgatcatcatgatatactgggatatcaagcacttcattcaattgatcttcgatttcaaaacatctaggcgctttgatatcttccagatgaataccggcaaaacttttactcatatttttaaccgtttgaacgaattctggaacactcgtttgttctagcgcaagtggaatcgcatcgactccggctaactctttatacaaaagcgcctttccctcaacgactggtaggccaccttgtggaccgatatcgcctaaacccaatactgcggagccatcagtgataatggcaactagtttgccgctaatcgtatattgacgggcaagcgctggattttgttggattaacttacttaaccccgcgacccccggtgtatatgcttttcccaaatcagtacgattcgttacgggtaattcaccgtgaatactcaagacacctgtatgtttttcatgcaatgcttttatttcatcaagagccattttatcaacctcccattttgataaatttgaagcattttaaaatatttcaaaaaacacgattatttttaaaatattttaaattaataatacgtctaatgcttcactttgtaaatagaaagcgctatatttaatatataaaatttttttattcgtctttgcgaataaattcattcaaggagcagcccatggccgaacaaacaaataccaacctattaatcgatattgctcaagatttctatatcaaccaattaaccatcgctgatatttcgacgaaatatcaggtgagtcgttacatgatctcaaagtatctcgatgaggcactcgcccagaatatcgtttcaattagtatccgctccccttttgcacggaaccaagaacttgaacgccaattggccgccgtcaatcctggccaccacttctatgtcctagcgaacgctgaacaaagcaataatgatgcggatcgtttttactcatttgcggcacaaacggttcaaaatctgattaatcctttaaaaattattggtctcagttggggagacaccgtctataacgttatcgaacactttaaaccaacggtcaaggaacagttaattttcactcaatttatgggcgaaaatggcaagtataattcactggcgggctcaatgcgcatggtgcaaaaggccgccaataaatacaatagccactattcaaccctcaatgcgccgctttacatcatcaatgatcaggttcgccaactcttaagtttagaaccagcgattcaacccaccctcaccaccgcgcgtcagatggatttaattctcactaccttaggaacaattgaatcattagaatctattcctagttggcaagagagtctagttgcattgttccctaatctcaatcgcaaggaagtcgctggctttttatatggtcgaccattcaatcatgctggtcaattcttaatcaatcccattgccgacaaaacatttggcttagccattgattccattttacaagtgccgattcgggtagccgtcgtgaacaataaatttaaaagccatgccgttgcagctgcacttcgcggtaacttcctcaccgatcttgttttagatgaaccaactgctaccaaaatcctagccattcacaattaacgcaaaaaaaccgccaagacaaactgtcttggcggttttttaggccttgataaaggctaatacgatttgattaaagagggctgattgttctgccatcacaatgtgtccggcttcttcaatcacctgtgcatgcccatcagcacccatttgtgccacgattggtgcgaaggctggattgaaaaacgggctcttttcacccgcaatcactaaatacgggcgcatactctggcgaatcacatcccgccaatcttgaaatgcatgatcgaccaacaacggtaaatcaagctgccgatcaaacggtgattgttgcttgacttgtgccaccacatcagccgtatccgtatcgattgcccggtaagtcgccttaccaaaatccaaacgcaattgcagcggaaaactatcccaagtcaaatccttaaaaccaaacgaccatgtttcatccgcaatcatcttgggtgactgatcaacaatcacgactttgtctaagtcacgatcaccgtacagcgacatgtatgcccaaatacaagcagcgcccattgaattccccactaaaattggcttggccaatccaagcttggtgattacttcagcaagatccagcgccattctagacattcgcaagcccttgacagtatgttgtgccattccttgattacgaacgtctagttgaatcactcgataatgatgagcttcaaaaaaggctgcttgcgcatgccaaatttccttggccgccccgaatccagcgataaaaagcattggctgcccttcaccaatatcagtataatccagtgtaatttgatctgaagttacaaatttcatttaattgcctggctaacgtcagtatctacgtcactttgtggcccatcaccgacaataatatccttgaataagccataaacaaagcggtttggatcaaagagttgtaagtcgttcatttgttcacctagaccaaccatcttcactggtaagtgtaattctgtgcgaacggctaacacaatcccacccttggccgaaccatctagcttggttaagataatcccagtcacatcggtcgtttgcttgaattgtttagcttggactaaagcattttgtccggttgttgcatctaagaccaacaatacttcttgcggtgcagctggtacttcacgcgtgatgatgcgtttcactttttccaattccttcatcaagttgacgttgttttgcaaacgaccggccgtatcaactaataaaatatcgaattgttcttctttagcgcgcttaaccgcgtcatagacaactgacgctggatcactccctgctgcactagcaaccacggggacattatcccggcgaccccattcttgtaattgttcgatggcgcccgctctaaaggtatcaccagccgctaataagaccttcttacccgctttttctaattggtgggcaaacttcccgattgaggttgttttccctgcaccattgacaccaacgaataagaagacagttaattcgccttgtggagcgaaatgcaattgattatcttctgcttggtcttcttgaccgtacaaatcaactagcttttcaacaatcgcttgtgaaaccgcttctggtttcttaacgttacgcaacttcacttcgtcacgtaattcgtcagcaatcttcatcgctgtttcgtagccaacatcggcttcaattaacatttcttcaacatcatcgaaaaaggcttcatcaacacttctaaagttagcgaacaacgcatttaagcgttgcccaaatgtgagccgagatttttctaatccatcatcatacttcttcgtttcagcagcttgcatgtcgccagttactgcttctgtttccggcacttcttcaatcgcatcggattcttcagttactgccgacgcttcaactggttctggttctggttctggttctggttctggttctgggtttacgggtgccgccgttggtgtgtcaagcggtgataccgtttctgaatcatcttcagttgctaaactggctggttcatcggtttcagttttctcagctgccgcagtttctgcaggggtttgcgattcaaccggcgtagcgtctgattcaaccggtgtttccggtatcgcttggtcttgttcaaccggtgtttctttttctggttcggctgagaatgcttttttaatacgatcaaataatcccatggttttcctcctaggctgttgcgtgttcttctaatgaaacggaaacaatcttcgagattccagattccgccattgtcaccccgtataagcgattggcttgggtcatcgtcccttttctgtgggtaatcacgatgaattgtgtatcactctcataacgtttcatgaaacgaccgaaacgatcaacgttggcttcgtccaacgaagcttcgacttcgtccaaaatacaaaacggcactgggcgtacttttaagatggcaaacaataacgtaatcgccgtcaatgcgcgttcaccaccagataaaagactcaagcgttgtagtttcttaccaggtggttgcgcaataatgtcaatcccactcgttaatagtgcgcttggatccgtcaacgttaaactggcatggccgccaccaaacatgatcgggaagatggtttcaaaagcagcggcagtttgttcaaacgtttccttaaaccgcttttcaacttccgtatccatttcagccatcgatgctaataattggcgcttagcgtccatcaagtcggcatcttgttgcatcaagaaatcgtaacgttctttaacatgttgataatcatcaatggccgccaagttgaccgttcctaaatcagctaagccgagtttcaataatttcaacttagaccgcaattgatcgtcggttaagtctgatgcggccaaagcggccttggcggcttcgtaagtcaattggtaatcttcgctcaatgtatttaagcgttgatcaatgttaattttaacccggttgagcccgacagcattttgttcttgctcagctaaactatttttttgtaattggtagacgcgtgtggcattggcttgaagcgtttgttgttccgccttcagcgtttctttttgcgcgcgttcagtggctaacttcgcttggactttctcaatcaaagcattggttgcctttagcagtgctcgtcgttctttttgactcgaagcatcttcttgatccgcttgttttagcgcagctagtttatcctgactggccttcaactgggctgccaggtcgttgctattgcgagtagcaaccgttaatttctcctgaacattcttttgttcagcttgagcgacagccaacttggtttcgagggctgtttgttgttgcgcaatttgtttttgactctcatcaaaatgttgtaattgctcattagctgtttcgagatctgcttgcagctgtgcaatcgacgcaacaatttcagcttcggctgccactaattctgcctggcgttttaaatcttcctcataagcttgttgttgttgttgcacttgataatcggttgcttgttgttgccgttcaaactgactcaaacgttcgtcagtcaaggctaacgtattttgggcagcttgatattgattcttagcggtttccaatgccgcttgtttcgtatttaattctgcttggcgtgccgttaattgagcttttgcggcttggacactggcttgcttttgatccaaagcgacctgcatcttggcaatttgaccttctaaatcagtcaaggtttgcttacgcgcaagtagcccaccattgttttgtcggttattatggcccccagtcatcgaaccacccgggcttaaaatatcccctgctaacgtaatgattcggtaacgatgccccgtcaattgactcaatttaatcgccggctccaactcagtcgcgacaatcaaattgcccatcaaatggttcatcaccggtcgcacttgttcatcaaactgcacaagctcactggcaattccgataaatccaggctgctgttgtaattggtgaactaagctacttggtagtaaacgtggtttgacaacgttattgggtaagaaagttgcccgcccaatccgattggttttcaaatactcaatcgcttgtttggccgtctgttcatcccgtgtcacaacttgttgtagctgtgcgcctaatgctaattcaatcgcttgttgatactcactgggcacttgcatcaattccgctacagcccctaataaaccagggaactgttgtttttgcttcaagacagccttaaccccttgataaaagccggcgtagtcatcatttaattccgcaagactggcttgttttgctttcgctttttgtaaaataccagacgcttggaaccaactattttgttgattttggtaagccgcttggtccgtgttaatttgcgtttgtaattcggccaactcattggacaacgtttcgtattgcgctttgagtgtttcaagttgggctttttgggccgcttgttctgcctttttttgtgccaattgcgtcgatgtctcatcgactgcactatcttgccgtgcaagttgcgttttagtttgtaacaagttcttttctaaatattgttgttcattatgattggtcgtttgggcttgcatctgatcgatgtattcttgacgaatttgttcaatcttcgctttcagttccgcttcactaccagacgcttggcgtttaagggtggttaactccgtcttcaacgcccttaatgccgtcaccttttcttcataacttgcctttaattcagattgattggcttgttccgccgttaattgctgttttaatgtgtcgatctgttcgactaaactttggcggttcgcatccgtataattagcgcgctcttttgaaacgttctcttggcctaatagattttcagccaagcgagacttttctaacaacgtctgattatcttgttctatttgttgttccaactgggctaaggttgcctgattctcggtttgggcagccgtcgtcttagcgatgtccgcttcaatctcttgcaacgcttgcgcaagggtttgcgccttttctttgtacgtcttttgatcagccactaattgatcaatttcaatcaccaataattgttggtgcaacgcatcatattgcgctttttgatccaagtaatcctgcgcaatactgctttgttccttcaacggttcaacttgtccccgtagttcatgaagaatgtcggtgacccgactcaaattttcatctgtttgatctaattcagattgagcctttttcttttgttgtttatatttcaaaacaccggccgcttcttcaataatattccgccgatcttctggtttactgttgaaaattgcttcaacccgaccttgcgaaataatcgaaaaagattctcgcccaaggccagaatccataaataaattaacgatgtcttttaaccgacaactcttttgattcaaataaaactcactatcgccatttctaaataaacgccgcgtaatcgttatgttggcttgttcttgtttcaaatattgatcgctgttatcaaaagccagcgtcacttctgccttattcatctgtggtcgaatatcagtcccggcaaaaatgatgtcgggcatcttttcgccccgtaagctcttggctgattgttcgcccatcgcccaccgaattgcttctgtgacgttacttttaccgctcccgtttggtccaacgatgcccgttaaaccttctgaaaaattgatttctgttttatcagcaaatgatttaaaccctgataaaaccaatgactttaactgcatgcactaaactccctacacacggcggttggtttcaactgtcgtttgcttctttctttatttcagtttggcaagcgccactttagcagctgcttgttcggctgcttttttgtttcggccaacacctgaacctaagacgcgatcgcccatcataacatccacttcaaattgacgggcatgtgatggtcccacttctgccaataacttatattcaatctcaacttcaccatcttgttgcaagaactcttgcagattggtcttataatccgtttggtctgaaaattcaccggcttcaatcttgggaaagacaacttgttcgatgaatttaacaactgcgccacgcccttgatctaagaacaaagcgccgttaaacgcttcaaataaatcttccaaaagtgttgctcgtgcccgcgcaccgtttttttcttcccctttaccaaggcgaatgtatcgatcaaagtgcgcttctttggcaaaactactgaaactcttcgtgcagacgattgccgcccgtaagcgtgtcagtttgccttctggccagtccggatattttttatataagtattctgaaaccgtaatttccatcaccgcgtcgcccaagaattcgagtcgttcgttatcacgaagacccaactcccggtgttcattgacgtatgacgaatgtgtaaaggcttcgtccaatagtgctaaattctgaaattcaatgccgtagcgggctcgaagctcgctcactagtgctgcatccaaaattaaattaccccatttcaactgtttaatctttcactattataccgtttatacgcttaaaaaaacagcgtcgttcctagcaaaccgtttcttttattaatcactaaaaaacgcctgttttgaagtattcattgtaacacgcaaacgaatatttcaaaacaggcgttgctttatgcagatggcgttgtcattgctgctaaagcggtttgataactcgctagttcagcttcagttgcatagacatagtgttcatcggccacttcgcgcaattgacgaccttcattatctgcctcaattgaactatcataagcaattcgccgacgttgccgctcgacctttggatcaggtaacggcacagcagacaatagactttgcgtatatggatgcaatggtcgatcataaatgtcatcggctgatgccaattccataattttaccgttatgcatcaccgcaatccgatcactaatgtatttcaccatcgataaatcatgtgcgatgaataaatacgtcaagttttgctgttcttgaatttctttcatcaagttaaccacttgtgcttgaatcgatacgtcaagcgccgaaatcggttcatccgcaatgataaatttaggttttaccgcaagcgcgcgggcaatcccaatacgttggcgttgcccaccggagaattcatatggataacgcgttgcatggtctttattcaaaccaactaattccaaaagttcgttgacgcgtgcatcacattctgcatcatttttaaccaaatgatggatatgcaagccctcagcgatgatgtctttgactttcatccgtggattcaatgacgcgtagggatcttgaaaaatcatctgaatctctttccggaacgccttcatttcacgactatgatttttaatcttactaatgtcacggccatcgaatagaatttcaccatctgtcgggttatacagccggatgatactccgcccagttgtactcttcccagaaccagattcacccaccaagccaaacgtttcgccttcatagatttcaaatgagacatcatcaatggctttgacttcggatttttttccttggctaaaatattgctttaaatgtttaaccgacactaatacttttttatccttgtccatcaattgtccctactttctcttgaacttgtgtcgcctgatacttagccatcattgcacggacggctgctggtggttctacagctggtgcatctggatgcaacaaccaagttgccgcaaaatgcgttttcgacacttggaaaaatggcggttcctgttccacatcaatttgtaaagcatatggattacgcggtgcgaaggcatccccttttggtggatccaacaagtctggtggggtccctggaatggcttcaagacggccagaagtatcaagtgttggcattgagttcaataagccccacgtatatggatgcttgggttgataaaaaatttcatcaaccaacccatattcgataatcttaccagcatacattaccgctacgcgatcggcaatccctgccacaacacctaaatcatgcgtaatgaaaataattgaggtttcaatcttgcgttgcaattccttcatcaaatcgataatttgtgcttgcactgtcacatcaagcgcggttgtcggttcgtcggcaatcaggatttgtggataatcaacaatcgcaatcgcaatcacgattcgttgccgttgcccaccagaaaattgatgcggataatctttcatccgtgctttggcattcggaatacccaccaactctaaaacactctgtgcacgtttcattgcttcttccttattcattgttttatgaatcaacaaaggttcagcaacttgtttaccaatcggcatcgttggatccaatgacgtcatcggatcttggaaaatcatggaaatatcgctaccacgtaaggcattcatttcctgttctggtttttgtaagagatcttcattgtgatacttgattgtaccacccttaatttgagcattgcccgctaacaagcccataatactacggaccgttaccgacttacctgaacctgattcaccaacaatcgctagtgtttcgccttttttcaagttgaaactgacatcgcgaatagcatggacgttccctgcgtaggttttaaaatcgatacttaaatgtttaacttctaaaatatttgccatttgacgacctccaatgatgaaaccgcgtggaaacggccttgtattgacatgctttttgaaactgactctgcttctaaacgtgctttcattaactgctttttatggttagctacgtctaacaaataatcaacaagttgattattcgccagactatgctaatccgcgaaagataaccgcctacttacacacgctatgattttggatcgaatgcgtctcttaatccgtctgctagtaagttgacggcaatcatgatcacacagaggactgctgctggataccacatttgatatggcaagaaacggaaagctttttgcccatctgataataacgtccctaatgaagcattcggcgctggaatcccaatcccgataaagctcaagaatgcttcgaagaaaatcgcactcggaattgtaaacatcgtttgaataataatcgttgaggataaattcggaatcagatgtttccaagcaatcttggtggaactttcacccaacgtccgtgcggcgagcacgaattcttgttccttaagttggaacgtttgagcccgaatcaaccgggccattgtaatccaaccggtaaacccaatcgcgatgacgattgacaataaacctggacggagtaccaacatcatcaagacaaccacaattaagtttggaattgatgaaatgatttcaattacccgctgcatgaacatatccaaacggccaccacgccatccggaaacaatcccatatggaatcccgattaataaatcgaccaatgtcgctagaatcccaattaataaggataagcgtgtcccgtataaaattcgtgataataaatcacgaccgagataatccgtccctaagataaacgttttgcctttgggaacgcccgcttgttgatatttatcaactttaacaccggaaacgtccatcttaccggtaaaaccagggatattccccgatccaattttagggggtaggttagcgtacgccacattttgtgtatttggactttgtggtgcaatcactggtgccaataaagcagccaacatcacaatcaagaggacaactaatgaaaccaccgcaactttattttgctttaagcgccgaatggcatcttgcgtaaacgtcaatgatggtgcactaattttttcttgtgcttcatgcgtgtcttgtgtaaggggcttgaatgagcccgctggtattttaatatccgccatttagtgcgccccctgactgtcacttaatcgaattcgtggatcaataatcccgtaaagaatatcgacgactagaataatcactgttaataagaatgaatagaaaatggtcaagcccatgattgttggataatcattcgtcataattgacttcacaaattgttccccaatcccgggaatcgagaaaatattttcaacaactagtgacccagtcatcaagttgactgccatcggcccgataatcgtaacaactggaatcattgaatttcgtaaggcatgctttgccactgtttgccattttgaattgcctttggctttagcgagttcgatgtaatcactgtttaaaacatcgaccatttcagtccgcatgaaccgggccgtattcgccaatggtgcaaccgctagtgctaatgttggtaagacactagatgaccagccgtcccataacgcaattgggaatagttgtaatttaaaggcaaggaaaaattggagtaagaccgccaacacaaagttcggaattgaaatcccaacgattgaaaagaacgttgcaacgccatcgacccatgtattcttgcgaatggccgccactgcccctagtaaaatacccagtaatgagccgacaatcatcgcttgtgccccgatttgtaatgaaggtcctaaacgcgtcatgattaggctcaagacgggctgattgttgaactggaaggatgtgccaaaatcaccatgcaacaagccacctagatagatgaaatattgctgaattaatggtttgttcaaaccgtactgttcattcatgatccgtaattgatcagcactcattttttcctgattcgtatatggcgtccctggcatcaacttcatcatgaagaaggtcacagaagcgacaatgaatagggttagcactaaatagaatattcgtttaacaaggtatttactcataagttcgctcctaacaaaaacgggcttcattgtttttcaacgctgaaacccatctttataaagtcagtttatttttttaaataaagtgagacattattgtagcttcctgaagggccgtagtctaaacctttaaggcttgggttagttaagtacgccacacctgattgatacagtggaatgacacctgactctgtattcataatatcttgtgccttaacaaggttttgccatcttgctttaggatcattggcgttgtcacctttacttgccttgatctgtgcatcgtattcggcattgctccaatggccattattgttatcgccgcctgttacaaacaagtctaagaatgtgactggatctgggaaatcagcgttccaagcactaaccaccatgtcgaaatcaccgttcgttgaacgtgttatacgagtcttaaatggcacgttcgctaatgtgactttcaaacctggtaagttcttttgtaatgtgttttggagatattcggattgtttcttggcagtatccgtatcatcgccaagtaatgtgtaattgaatgttttgcctgtttgcccagtttcagcaaggccttcgttccaaagttttgttgcttctttagggttgtaacttacatttttcttacccgctgcgtctaaatcatcaacaaaatctttcttagttgttgggtcaaatgacatattctttggtgtcacagaagcaattggacttgaaccatcacctagaacctgtgcgactaattctttacgattaattgtcattgaaattgctcggcgaatcttcgcatttttaaagattggattcttttcttggttgacttgcatgtagaatgttgctgctttttgtaaggttgagtaatgtggatcgtttttcatttgtttagctgtgtcaccactgatcgccgtccgatctaatttattactttggaagaggtttaaagctgttgatggatctttaaccacttgatacttcaacgtcttaaccttaactgctttcgcattccagtaattggtgtttttaacttctttccatgagctatctgggccattccaattttctaatttataagggccgttgaaaactaatgttttagaatttgtcccgtaactcttgccagctttcttgaccgcttctggatattgggggaagaatgttgaactggtcatcaattgactgaagtatggaattggtttttcaagggtgacttctaaggtgtgtttatccttagcgactacacccaatgaattaaccggttccttaccagtcgtgatgtctgctgcatttttaatgccttcatagatataagcatattgtgaaccgacctttggatcaacgactctgcgccaagcataaacgaaatcttctgccgtgaccggttgaccattgctccacttcgcgtcttttcttaatgggaatgtatatgttaaaccgttattagttggtttgactactttagtcgcaatcgccggtttaatttctttaccctcgtagcggtaaagaccttccatcgtatcggttaaagcctgtgcaccgatcacatccgtatttaacgctgaatccattgtcgcaatgacatccccagttgcaaaactggctgtgtcagtcttaacggcttccttgctacctgagttaccacaagctgctaataataatgtgaccgccactgttgttatacctaataccaaactcttttctcgtttcatatggacactcccttcagttattaaaaataataatacatgattaaaaatgaaaagtaaataataaagattaaaatattctaatttattttcattgatgcagagccattataagaatcattctaatattataacgcatccgcaaatgattattatgtgaataatctcattttcacaaactgtttaaaatgcaaaaaaataagcctgtcggtcgcgaatactcacaaccaacaggctcgttttcaaggttattatttgatttttgttttaatgtaagcaacggcatcagctaccgtaccgatcttttcagcttcttcatccggaatttcggcaccaaaagtgtcttctaattccaaaacaaattccacaatatcaattgaatcagcatccaagtcttccttgaagttcaattcgtctgttacctgatccttatttaactcaaatcgatcgccaataatagccgcaatcttatcaaagatttcttgttcattcataattaaaaacctccaaattgaaacccttacctacgtacttaacactttgggtatccagtgattatacataacttcgcaactcaattcaagtaaatcaaatcagacttgcgaagtatattgtagcgcctttggaacacattgtccacctattttaatcggtttcttttgggctattttgttggtcaaaataatcgattactttttgaatcgtttggttcgccagcattgcatgaatctggcgaacagtgtagtaaaccgtgcggccatctgcagcaccgtgcgccttaacaacaggggcttttaagcctaataaaacagccccgccataaacagatgtgtcgaatttatcacgaatcccaccaacactctttttcaagagtaaaccaccgattttttctttgacaccagcatccataatcgcatgtttgacttgcgacatcacgattgtggcagtcccttcaattgctttaagcgtcgcattgccggtaaacccatctgtgaccacgacatccgcaacgccttttaagagttcacttgcttcaacgttaccaatgaagtttaacgttagatcatctgccagtagttgatgtgctgccttatgcaactcatcacccttgccagcttcagtcccattattcaacaaaccaattcgcggcttttgaatgccacggacgtcttgtgcgtagaagttccccattaagccatattgatgcaaatgctccggctttgattcggcgttggccccaacatctaacatattgaagcctaaatctgaattaatggctggtagggtaggcattaaacctggacgatcaatccctttaatccgaccaatcacgaataatccggctgctaagagcgcaccagtattccctagtgaaaagagtgcgtctgcttccccatctttaactgcctgcgccgccagaaccattgaagcttgctttttacgccgaatcgcacgcactggttcatcttcgctggtgattttttcggtggtatgcacaatcgttaaccgcgtcatatcatcaatcaacggtttaatttgtgcttcatcaccatacaacgtaaattcaacatctgttaattctgagcgggcttgtaacaccccttcaattactgattggggtgcaaaatcgccgcccattgcgtctactgcaattttcatcatcattcctctttccgttttcaatctaacgttaggtaattttgcttttgttgttgtaagtatgttttgagtggcgtatggtccggtgctgccaactcaggatcaagcgtgaagattttttgcacttcttgttgggcgacttgtaaactcgcaaagtcggctactggatcgccaactttaaagacgggcaatccagattgacgatcaccaaagacttcccctggcccgcgcaattctaaatccttctgcgcaacgacgaatccatcagtggtttcagtcataatcgtcatccgatcaacaccttgttggttcttcggatcagccaccagaatacagtatgcctttttcttacctcggccaacccggccccgtaattgatgtaattgcgccaacccgaaccgatccgcatcaaaaatgagcatcaccgtcgcgtttggcacatcgacaccaacttcaacgacggttgttgaaaccagtaattgaattttgttctcagaaaaagcgttcataatctgatttttttcatcatcttttaactggccatgcaacaatgcaacatggtaatcaggttcaaattgttccaccaacgttgcgtaaatctcctcggcattctttaaatccatctgttcagattcggcaatcaatggtgtaatcgcaaagacttgcgaatcgtttgcaagttgtttacggacaaagctgagggcttgttcgacttgattactacgcacccaactggtttcaattggaatccgtccttttggcaattcatcaatcgttgaaacgtccatctcgccatacgcggtaatcgccagcgtccgcggaatcggggtcgccgtcattgcaagaatatcaggctgtaaccccttttcacgcaaaattcgccgttggttgaccccgaaacgatgttgttcatcaattacagcaaagcctaacttatgatagaccactgcatcttgaatcaaggcatgggtgccaataataatattgatgcgcccggattcaatgtctgccaacaacgtccgccgttctttagccgtcgtcgaaccggtcaataagccaacagtcacgttcattggtgccaataagcgttgcaagctttgatagtgttgttccgccagaatttccgttggcaccatcaatgcggcttgataacccgcagtcactgccgcgaacagcgcaatcgccgccacaatcgttttcccagaaccaacatccccttggagaaggcgattcatatgcgctggtgattttaaatcaagacaaatttcattcaccactcgcttttgtgcatcggttaaatcaaacggtaaggtttgaataaaatctttaagtgcttcattttggtactgcaaagctaaaccgtttgccacatgccgatcagtctgtttaatggcttgtaattgaatctgatataggaagaactcatgaaaaatagcgcttcggcgtgcttgctttgcttcaggatacgttttagggaaatgcatgccagcaattaagtcgcgttcgttcattaacttatagcgcgtgcgaatatcctctgggatcaattcgggaataacgtcttgatacaaatcaaaggcttcttgaatcatcttgaccagtgtcccttgacgcacacttttattaacggaatagatggccgcaaacgatggattctcagccgattgaaccgctaggaccttcatccccgtcaatgtatgacgtttagcatcccacttgccataaatagcgacatcgaccccggcttcaaacttgtccttaagatagggttgattaaaaaaagtaaccatcacaacgtcatgttcaatcaagagccgtacattcagccgggtcttccctggtccccaacgactgatgatcggatcagcgacgaccgttccttttaacgtcaccttttcctgatctgccgcttcggataaatccttgaccttcaaatcttcgtaacgaaacggaaaataatacaataaatcactaatggtccttatgccaagctgatcgagggctgtcagacgtttcgggccgacgccagctaacacagcaacagaatccgttaaacttaacattgacagcctcctgtaacgtgctttcaaaagcatcctgttgcgtttagcaccattagccaaacaagtagctacgctagtcattcggctaattaaactaatcctcacaggataagcacttttgatacacttctttttcttaacgtgctttttaaccatattccaaggttaaacgtacttctactaaaaaacgggaaccaggtatattcaacctcattcccgttttatttgattaactattcaactgaaatcaagtatgggtaaactggttgattcccttcgtgtacttcaacttctaattctgggtcttgggccataattgcatcactgatttgttcagcttctgttgcatcgccgtcttccccgataataattgtgacgatttcactgtcttcatcaagcattgtttggaccatttcaatggctgctgttaaacgttcagccgttgagaccttaatcttaccatcgataatccccatgtaatcgtctttcttaatttcaagtccatctaaagtcgtgtcccggattgattgcgttacttgaccactaatcacggtatctaacgcctctgtcatggcttcttgattaacagccaattcagcagatgggtcaaatgataagagagcggtcatcccttgagcaatcgtccgactttgcacgattgcaactggaatatcagccacttcggcagcttgttcagcggctaagaagatgttcttattatttggtaataagatcacttgtttagcattggctgctttaatcgcatctaaaatatcttgcgtacttggattcatggtttgaccaccacttaagatataagtagcccctaaactcttgaagagttcagcaatcccatcaccggccgcaatcgcgataatcccattttcaacaggttctgcttgcacaggggcagcagcttgttggtcgttttcaacaatcgtatcatgttgtaaacgcatgttatcgactttaatcttcactaatgaaccaaagtgttggccgtaagccatgactgtccctggatgttctgtatgcacatggaccttcaccacttcttcatcggctaccactaagagagagtcaccaacaccgtttaaatgattgcggaattcatcataatcaaattcgcgatcgacagttgtcccgtcaccaagggcgaccatgatttcagtacaataaccattttcaatatcttctgtacccatttgagcggtttgatgatgattggcattgaccatttcatccatttccgcttcatcaggtgtgtaaagatcttttgcaggtgcttggcctgttaaaccttctaagaaaccttcatagatgaagaccaatccttgaccaccagaatcgacaacgccgacttcttttaagacagggagtaattcaggggtcttcaacaaggccttcttagaaccctcaacaacagcttcgataactgcaccgatatcatcagtttgaccggcaaccttggcaccagctttggcgccttttctggcaaccgtcaaaatcgtgccttcaacgggtttcattactgctttataagccgtttgaacaccatttgtgaatgcgtcagccaaatcttgtgcatccaacgtttctttttcagccatgctcttagaaaaaccacggaaaatttgtgaactgataaccccggagttaccccgagcgcccatcaaaagccccttggctaaactcttagataattcaccgacagattgcgcgttgttttcattaactgctttggccccactttgaaacgttaaactcatattggtcccagtatccccatcaggcactggaaagacgtttaatgaattgacaaattctgcatttttagtaagccgatgtgcagcaacccgcatcattgcttggaattctgctgctgtgatttcagtaactttcacgaatgttcctccttgaacaaaaacaaatagaactggacctagtggccagctccgctaattagttttagtcttctaatacccgtacaccttgaacataaatattcactgagttcgcaccgacacccaacattgtttcaagattgtacttcactttactctggacgttacggcaaacttcagagatcttaatgccgtaaccaacaataatatagacatcaatcgcaacgccattgtcttcttgacggactacgacaccccgattataattctcacgattcaaaatatcgtttaaattgtcacggatttgattcttacttgccatcccaacaattccgtagatatctgttgcagcgccaccaacgacggttgcaatcacgttattggtaatatcaatatcgccatattgtgttttaattttaacagccattaaaatagcctccttgtgccatacttattgttattttagcatagcggagaagagttgcaaagcaactggtgatgaattcttccccaaatgcggcttatttttggactttaatgagtttaaacgacttattttggactgtcaagtaaatttccttgaaagagctcttgcattccccaaactattatggtaaattatttaagtgaattgtataagccggtgtgcatgcatgcaactattaagactaactgaatcatattatgtttctcgttaattctaccggctttacttaaaggaggaataagaccatggcaaaagacgttattaccggccgtaaaacatcatttggcaacaagcgttcacacgctttgaacgcatctcgtcgttcttggaagccaaatttacaaaaagtacgtatcttagttgatggcaaacctaaacgtgtttgggtttcagcccgtgctttgaaatcaggcaaagtaactcgtgtataatttcaattgatagatcgccagttggcggtctatttttttggcaaaaagtgcgagataagtcggctaatcctcaggcgatgactgatcgaacacgtttatggcaaccaaaaagacggctcggataaaataattttatccgagccgtctttttaatccttactttgaatcaccgcaaccaccccagtttcaaaactaaattggccggtctcaccgatgaactcattactagcccatgaaatcgggacttgtgtttggtaatccaccaagcgatatttttcatcaattaaatttaaaccagttgtgggaactaatggcacaaaggccagataccgtttatcggcttctttttgtaattgatacgtccctggtgcataaaagcgaatcgtattttgccgatcgcgcatctctaagcggtctaaaaacggcttaaaacggctttctaagggcataaagagattagcaagaaagtggtccaaccgaccgcctgttgcgccataaagcacaacttgatccgcattaaattcagttagcgcaattgataatgccaactgagtgtcggtatcatctttttctgcttgcacagagcgaatatcctttactgctgattgaacggtggtccgctcagccgccgtcaatgaatcaaaatcgccgactgacacgacaggtgttacgcctttttgcaataagcgccacgtaccacggtctgctgtcacccattgaccatcaatcatttctggctgcgccaattcgggggcccactcactgactggtcctcccaccaacacattaatccgcgtcatgagcagcctgctttaaagttgcaatccgggttgctaaatcaccggcaaacgtatatgaaccggcaacgaaaacatctgcgcctgctttggcacacgcaccgatggtttggtcgttaaccccaccatcgacttcaatcgtataatctgcatcagcatgttgatcgcgataagtcgctaattcagtgaccttatccaacatcgctggaataaacttctgcccaccaaaaccgggattaaccgtcattactaagacttgatcaaccaatgataagactggttcaatcgcactaactggtgtccctggattgatcaccacgcctgctttaacaccagcatctttaatcatctgaagaccacggtagagatgttgcgttgcttcggcatgaatcatgattaagtctgaaccagctgctgcaaattgttcgatgtagcgttctggttgttccaccattaaatggacatctaagcctaacgttgtcaatggccgcaagccagttactacttgggggccaaacgacatgttggggacaaacatcccatccatgatatccacatgtaatagatcagcgcccgccttttcaaggttttggacgtctctttgtaagttcataaagtctgcgcttaaaattgaaggtgcgatttgtttcatcatcaaaactccgatcacatttttattttgacttcttgtaaactggccgaatatcctttaattctgctctaaactgtaaataattcgtataacgactttgcataatttcgccactgtcgacagcttctttcacggcacatttcggttccatcacgtgttgacacgttctaaacttgcatccttgcccgatttctctgaactctgggaatcggtcaaccaaggtttcaatcgtgacgtttaataaaccaagtgatgaaaagccaggcgtatcaccaactaacccatcattcaacggaatcagttcaatatgccgggttgtatgtttcccacgatttaaactctgcgaaatttcggcagttgcaatattcaagctcgggtcaatgtggtttaacaacgttgacttaccggcccccgtttgtcctgtaaagacggttgttttatgcgggaacgtgtcttcaattgccgtaattatctccggtgtaaaggcggtccgcggtgcaaaaatttgatagccaatcttcgcgtaatacgccaagtaatcactaatttcttggtattgttgatcactaatcatatcggtcttggttaaataaactaacccttgcatgtgcagcgattcaatataaatcaagaagcgatccaacaaattcaaggagaatgctggttccaccgccgaaacaattacgacagcattatcaatattagcgactggtggtcgaatcatctcatttttacggtctaaaatctcaagaatatagccactttctgtttcactttcactctcgaattcgacaaaatcgccgacaagtggcgtaattttccgtttacggaaattaccacgcgcacgcgttcgataaattttgccttcactttgtacatcataaaacccactgagggcgcgaataatctgtcctgtctgcaataggtcacctcccaattagtttgtcacatggtcatcagatagaatctcttgaccatttcttaaaatccggaaacggccggcttggtccgctttaatcgtaaatggcaattcaacggttgtatccgcggtaatcgtcatttctttataaacactcattattgaatgcgtgctatcttctaaataaatcgtaatcttattcgtcgtagccgttgaagtactacttgaactagagctcgtactactactgtcacccgattcgctcgagctgcttgtactactttgtgaagttgctaaggaattatcaaacggaatcgtaatcgacttcgtaaaactcttggtagcgggcgcttttttacctttagaaagtaccacgttaatattggcaccttcttgaatagatgcaccactaccaggtgattggctaatgactaacccttcatcaatcgtattggagtaatcctctgaaaaagtaaccgtcaaaccaacgtcatcaacatagtcttgaacagcctgtttcgtgtaattactcaaattgcgtaaagtaatgcttggcttgccgctgctgacagtcaaggtaatcgtcgtcttacttgggacaactttttcacctgcggcaatgctttggtctaaaaccagtcccgaagcaacactgcgtgaactctgatatttgcgcacaaccgtcagtcccttttgtttcaataacgtgctgacatctgtgaacggcttgtccgtataatcttcgatctcatactttttacgacccgtactgattgttagatcaaccgtactgcccgatttaacatgcattcctttaccaggcgtcgataaaatcacatgccctttgctgtacttattgctagtagttttttgaatcttaccaacttttaatttatctgcggttaatgctgcagtcgcgttttcttgcgtcatgtctgtcacatctggaacagtcacttcactgccttgcattgcgtacgcagcgaagaccccgagcatcactaacaagactacgccaagccccacaaaccaccatttccgcttcgacttcttatgcggctgtttctttttctgatcgtcttttacttcagtctcatctttgggtttggcttctggcgcattgttttggcgcgtaatcccttctgggtcaagagccggaatcacctttgtttcacccatatcaccttgtgagggcacgaatttcggttcatgcgcccgactagctgataatgaggtactcaaatcagtggtcatttgcccaacatcactgtagcgttcgtccggatctttggcagttgcttttaacacaacgttttccaaagcttgtggaatccgcggatcataatctcgaacgggtggtacagcatcttgaaaatgtttaatcgcgatggaaacagccgattcaccttcaaatggcaccatacccgttaacatttcatacagaataatcccgagtgaatagatgtctgaacgtttcgttgccattgaaccccgtgcttgctctggtgataaataatgcactgatccgagtaatgtattggtctgggtcatcgcggtttcactgagcgcaatcgcaatcccaaaatcgctaatcttaacgttacctgcttcatcgaccaagatattctgtggtttcaaatcacgatgaataatatcgtgcgcgtgggcattttcgaccgctgataaaatctgcgtcataatatcgacgacgcgttgataaggaatcgggaagtgctcaacgatatacttctttaaatctgttcccttcacatattccatcacgatgtattgcatgctgttttcttcaccaacatcatagatactgacgatattggggtggttcaattcagttgtggcaagtgcttcgcgtttaaagcgacgtaccgtgttcggatcgttccgtaaatcaagtcgcagcaccttgaccgccacttggcgatccaaaatcagatcttgggccagataaacgttggccatgccaccttctccaattggacggataatctgatagcggccattgaccgcgtagcctgtctccatcatcgcgcaccctcctcaccagtttgatgtaagattaacgccgtaatattatctaagccaccggcatcatttgcttgttgaattaatgccgcacatttttcttccagcgatgtcggtgtcatcagcgtggtcttaatttgttcatcatcgaccatattggttagcccatctgtacataataatagataatcatctggttcaaattcgtaaattgttacatcggcatcgacatcttgcgaaacgcctaatgtgcgcgtaatgatgtttttttgcggatgatgctttgccgcttcttcggttaactccccttgtttcaccaattcatttaccaaggaatggtcctctgttaattggcggagttcgttattccggaagcgatacactcggctgtcgccaatattggcaactaagtaattggcacctgaaatcaacactgcgacgagcgtggtgcccatcccaaacaaatcatcatactgattagccttcgctaaaatatgtttgttttctttttgtaattcgaaaattaaccatttaaccatggattcaatgtcggtatcatcagttcgttcgaactcgtacccaatatgggaaaccgccatttctgaagcaacatcgccgcctaaatgaccgcccatcccatcagcaacaatcgcaaactgcgcaccgcttttattggtataaaagccgacatagtcctgattattttggcgttgttggccgacatcggtttgaaaagcaactttcataagaattcacctcaattaataatttaagcccgtcgtgttaaacaagcgatgaaaaagccgtctgtttgataatcatcgggatagatttggacaaacggtgtcgcttgattggctggcaatggtttgtcgagtgctactggtacgatttcaaattctggatgattggccacaaaagccgcaacaacttgttgattttcttctgggacaatcgtacaggtactgtaagtcaattgaccacccacttttaaggttggtgcaacggcttctaaaatcgccaattgaatcttttgaaggttcaataagtctgctgcttggcgaccatacttgatttccggtttacgtcgcattaagcctaagccagaacatggtgcatcgactaaaatcttatcaaatgtttcaggttcaaattgttcaccgactttgcgtgcatcgagcgcccgcgcatcaatgacgtctgcaacatgcaaacgcttagcgttttgctcaatcaagcggactttatgttcatgaatgtctaaggcagtaatttgccccccttgactggcatccaaataagtcgccatatgtgtcgttttcccacctggggctgcacaagcatccaagatccgatcacttggttgtagttgcaaacttggtgccactaacatcgagctttcatcttgaattatatacgcgccttgttcgaacaattcaccgctggctaagtgaccgccgtgggcaactaatccagcggctacaattacactcggttcaatcgttaacccgtcagcctgtaagtctgccaaaacggcatcaactgaattaacacgggtattgactcgaatggacgcattcgctggttggttaatcgttgccaataagtgttccaattttgattgccctaattcttggtggaacttcgccactaaccactgcggcatactgtaagtcacacttaggcgttcgattggatcggcaattgctgctaaatcaggcaatccagtccgttgttggttccgtagaattgcggtgaccaacttagccgtgccagcatggcccatttgtttggcaatctcagttgcttcataaaaaatcgcatgttcaggaacacgatccaaataaacctgttgaaaaactgccgtccgtaagacttggcggacccaagttgccagtttagctggtttttgaataaagggggctaggtaataatcgagtgtcatttcatgttgaatcacaccatacacgagctgcgttaaaaaaccagcatcttggggattcaagtggttttgtttaatcacttggtcgagggccaagtttgaataactgttttgtttggcaaccgccgttaaaatttcaacagctaaatagcgtggtgtctttttaggcatcttgcaccaccacttgttgtccgactgcgagttgtttgccaaccccgtttaagaaagattggaccggcattttagccttaccagctggttgaatctcggtaatcttcaaaacactgccattgccggctgctaattcgaaatcctttttgttgatagcgacaatcacaccggctggttgatccgtcgttgtttcagcaacagttgcttgccataattttgtccgttgaccattaattggcaaccaagcgcctggttgtggccgtaacgcacgaatctggttgaccagttgcgttgctggttgctcgatatctaattgttcttgttccttagtaatattgtaagcaaacgttacttgtgcttcatcttgtggtgtccggggcgcggtttgatcgataatgcttggtaatgtcttcaataatagatctcgaccgacataacttaacttatcaaataaagtcccggtgtcgtctgaagcttcaattggaatgctggcttgttcaatcatatcaccggcatccatttttttagccatatgcatgatggtaatcccaatttctgaatcgccgtttaacacagcatattgaatgggtgcaccaccacgatatttgggcaagagtgaaccatgcacattgatggctgcaatcttagcggcttctaataacttcgttggcaagaattgaccatatgctgccgtcacaattaaatctggttgcaaggccatcacgtccgctaattcttgactaccactgagtttttcaggttgaaaaacagtcaggtttaagcgaacagccgcttctttaacgggtgtttgttgtaggacttgcttgcggccaactttccggtctggttgggtcacaacggctaggacttgataatcgtgtgccacaagggcttctaaaatcggtactgaaaattggggagtccccataaatacgatggatgtcattaatcaatcacgctcactttaagtaaattgtaggggttcattgtccaacccaatcttgaaaccatgacgggtatcaatttgggtcgtttcgagaatctcggcgagtttcgcctgaagttgtggttcctgtttatatttaatcacaatttgatagaaataacgattattaatccgcgcaatcgacttcggcgtcggacccagcacaatcgcttggtcggataagacgggccgtaattgacgggcaatctggaaactcttcttggctgccaacgcttcttcaggatggctaatcgttaactgtaccgtaaaataatacggcggatagccgccccgatggcggactgccatctcatattgatagaagccttcataatcatgttgcttggcaaattggatggcgtaattttccggattaaaagattgaacgataaccgcaccgattttatcggcacgaccagcacggccactgacttgcgtcaataattgaaacgtgcgctcacttgcccgaaaatcaggtaacccaagagcggtatcggcgttaatcacgccgacaagcgttacatcgggaaaatcaagccctttggcaatcatctgcgtgcctaataaaatatcggcatcgtggtcgccaaagcgtttgagtaatttagcgtgcgcaccttttttgcgggttgtatcaacgtccatgcgtagaatacgagcatttggaatcagctcttggagttctgcttcgactttttgtgttcccgttccaaaatagcgaatctggcgactctgacaatttggacaagtccgcggaattgcttcttcatgaccacagtaatggcacttcatcgagtgcgtatccatatgcaacgtgagtgagatatcacagttgggacactgcaagacaaagccacaatcgcgacacatgataaaggatgaaaaaccgcgccgatttaataagaggacgctctgttcgcccttttgcaaccgatcctttaacgcatctaatagcgcaggtgaaaaattgctgctggcttgttgcttcatcgcctcgcgcatatcaaccaactcaactgccggtaatggctgttgattaatccgttgcgtcaggcgcaagagttggtagacgcctttttgggcacgggcacgcgattcaagcgatggtgttgcactcccgagaatcactgggcaatgatggtactgactccgccagatggcaacatcgcgggcatgatagcgcggactttcatcttgtttataggaagcttcatgttcttcatccatgataatcacaccaatattctccaatggtgcaaaaacggctgagcgcgccccaacgacaacgctggcttctttgcgttcaattcgccgccattcatcatacttttcaccttcggataagccactatgtaaaacggcaacttgatcaccaaagcgacccttcacgcgtttgaccatctgcggggtcaaagcaatttcagggactaacattaatgcagttttcccctgttgcaagaccgcatcaatcgtttgtaaatagacttcggtcttaccgctgcccgtaatcccttcgactagaaaaacccgatcagattgggccttagtagccgctacaacggcttctaccgcatcagcctgttcatcagtcaacgccattttttgcgtcgttgtgacggttttaggataaggatttcggtaagcttcaactttaacttggcgtaaccaacctttgtcggcgcctgtcttgatattctcccgggtaaaagtcgtcttggccaaaacatcctttaataagggattgggctgatcaattaaactttgtaaataactaatgagttgactctgcttttgcgctgacttacgtaagccggcccgcgcttcttctaactgttcaaacgataatgccggttcaatcgccgttaattgcttcacgcgggcgcgatcatcgacatggtagaccacttcgattttcccttggcgttgtaactgcatcaattgttttaacttttcgggatctagcgactggtcaaacgttaattcgtcgttaccattgaacaggcttgcttgtaaggctggatcaatttcatcaactagttgcgcggtcttagaatacttagcacgcatcacacttgggagcatcgtttgcaagcacgtaatctgaaaggcataggtccgctctgccaaccaacttgataattgaagtaattctgaattcacagccggttgtaaatcaatgaccgccgtaatcggctttaattgcccctcaaaattggcttgatcctgaatggacaaaataaagccttgaattaatcgatcacctttgccaaaaggaaccgccacacgcatcccaggttgaatactgtctaataaagtatccggtacttggtaatcgtatggccgattagtttgcatcgtcggcacatcgacaatcacttttgcgatttgtggcatctaaatcctcctttttagttaatctaacaagtcagcaactcgttctagaatttgagtcgcaatcacccttttatccgccaacgctaatgtttccggtgctgcattcggttgtaaaagcgtaaccgcattttgatcaacaccaaagccccgatcatgctgactgacatcgttcgccacgagtaaatcaacatttttagctgctagtttggtttgggcattttgtagtaaatcatctgtttctgccgcgaatccgaccaagaattgatgcgtcttctgttgcccaagcgtcgccaaaatatctggggtacggtctaaagttaactgcatctcagttgtgttcggttgttttttgattttgtgcgtgacatattgggccggtttaaaatcggcaaccgccgcagccatcaccacaacatcggccccttcaaagacactgctaactgtgccttgtaattgcgccgccgtttcaacgtaaattattttgtgcaaaccagccgggactggcaattctggacgcgtgctgatgaggatcacattcgcccccatcgtcacggctgcttgggccactgcataccccattttaccagaagaccggttgccaatgtagcgtaccggatcaattggttcttgtgtcccaccggcagtcaccaccacgttctgcccgcttaaccgttgcggtccgaattgttgcgcaacttctgccataatcgcggtttcttcagggaaccgcccgacaccagcatagccttccgctaaaaagccggtatccggttccatgacagtatagccatctgctttaagttgggttaaattccgttgggtagctggattaaaccacatatgttcattcatcgccggcacaattaatttgggcgcggtagtggctaacaaggcggtcgagacaaagtcgtcagcaatcccattagcgagtttcccgattagattagcagtcgccggagcaatcaccgccagattagtccaatccgctaagtgaatatgggcaacccgatccggttggtcttgattaaacaaatcagttaacacgggtttacgcgttaatgtggcaaacgtcagtggcgtgacaaattcggttgccgcctgagtcattgccacttggacctcagcacctgctttaatcaatccacgtaccaaattagccactttgtagacggcaatgccacctgtcacataaactgcaattcgtttattcgttaaatccactttcaaaaccccctaaaactaaaaaaactgcactttaatttaaacatccatcgatgaataaactaaacatgcaggttctttaattattcttattcgctgtctttttgagcgagcttatccattttttcagcatctttttcaagcatcaatgaatcaggatcaataatgacattgccagcagcaatttcttccattgccatcccaaccgttttaggtgatttgtattcagataacatcttaatatcaccggcttcgatttcatgggcccgcttgctagctaaaacagccaatgagtaacgtgagttcacgttttctagtaacttatcaattgaaggatatacaatcatattattattcccctatcattttcttgtattggtcgatcacacgtggcactcgtaagtgttcactttcgataatcttttcgattcgttgaaccgcatttggaatttcgtcgttgacgacagcataatcgtaattttccatcatcttgatttcgtcggctgctttttgcatccgcttatcaatcgttgcttgatcgtctgtgccgcgtttttgaattcgattccgcaattctaataaatcgggtggtgtcaagaagatgaagacgccatcgggacacttctcgcgcacttgcattgcgccttggacttcgatttctaataaaacatctcgccctgagtctagtgtctgattcacatacttcatcggtgtgccataataattatccacgtactgtgcatactctagcataccatcatttgcaatttcttgctcgaattcttctttgctcacaaaataatagtcaacaccatcttgttcgcctggtcttggctttctcgtcgtcatcgaaactgaatagtgaaaatcacgaaattcatcttctagcattgcttgacggacagttcctttaccgacccctgatgggcctgataaaacgatcaacattcctcgattggacatctacgtaattccctcttcttttataaaatagttaaagtctattctgcactatttggcgggaaatttcaagtctactttgtttccatctcatttaaaattaaccttaaggacgcaatttcgtcgtttgacagcgtcacacccttacccattttggcatgatccggtgcccaatctcgcaaatcaaattttggtgcacgttgattccaagagattaaattcaattctttacgccaaccagctggattttcactcaacacaccgatttctgccataatttcatattcaattttgcccatcaaatcaccctttctatcagttcatcctattatacacgaaaaaaatcaaaaaatgccgcttgcaattctgaacgtttgttcgtataatgaaaacacaaacaagtgttcggaggatgaaatcatggaatttaaacaagcaacggttagcggactcagtcaacaattggttaaacaatatcaccgcttttttgaacttacaccagaagcgactgcttttgttgaacaaccccaaatgcaacctgctcagattcaattatttatgacccaagcgtttgaacgccactaccatgttgcggtgcaattcaatgttaacgatcatctcgaacaagtgaccgggcgcttggttaaacaactcagtgcgaacaagtatctgctaaaagagagtcgttcgaacctctacaagattgtcctttgcaatcaaattcgttacattcaaaagaaaaattaagcaaaaaaataagggtgcagccaaaaaaatattttggctgcacccttattttaatgtcggcgactttgcttagccgtttccgctaatgccaccaattcttcggcatgttctaaagttaactctgttacttcagtccccgctaacatccgtgccagttcagcaatccgttgtttaccggttactttttgaacggacgtttctgttcgattttgtttcacttgtttttgaatttgatattgatgatcactcattgctgcgacttgcggcaaatgcgtaatgcagagcacttgcgaatgttggccaatttcactaatcttattggcaatcgcttgggccacacgcccactcactccggtatcaacttcatcaaagatgatgctagtaacgccttgtgattcggagaaaatcgttttaagggctaacatcaagcgcgataattccccaccagaagcaattttagcgagtggccgtagtttttcaccagggttgggttgaatgtaaaattcaactttgtccatcccggaagccatgaactgttcctgttcatttggcaagaattcaactttaaagaccgtcttttccatgtataacgcttttaactgttgatgaaccgctttttcaagttgcttagctgctttttggcgtaattgcgtcaacgtttgtccgtttgtcctaagttgttgttcaagttgcgtgaattgctgctccaactcacttgcgttcgcttcagttgcttgcatcgctgctagttcagccccgattttttcaccataagcgagaatttcggcaattgaatcaccatacttatgttccaaattattaatagtttctagccgttgttcgatttcatctaaccgtgcttcatcccattctaagtttgaaacttcccgactaatatcaatgctactatcttgcaacgtgtaataaccagtctgcagactgtccgcaatacgcttgaattctggatcgagttcagcaatttcttgcatctgattcattgcaactgcgatttggtctaacgcattcccgtcttctcctgctaaaatcgtgtgactggcttgcaatgcttggttaattttttgaaagttcattagtttggctcgttcttcgactaacttgctttcttcatcagcctgtaattgggctgcatcaatttcgttagtttgaaatttcagcatatccaagcgttgggcccattcttgttcattttgctgtttttgcttcaaggcacgctgtgctttacgataggcagcataggtttcggcataggctgccttcgcggttgttaacttttggtgcgcaaattcatccaacaaccccaagtggcgatctggatacattaattcttggtgttcattttgaccgtgaatatcaactaaggtttccccaatatgcttcaaagtggttgtattgaccaaatgaccgttgacccgacaaacattgtgtccattaacggctaaatcacgctgtaataagacggtttgttcgtcgtgttcaatgccaaactggtctaatactgcggcggttgcgccattaggcgtcatcgtaaataagccttcaagggtcgcttttttagcaccagtccggataaagtcttgtgaaccccggccgccagcgagtaacccgactgcatcgataataattgacttaccggctccggtttcccccgagagcaccgtcatcccttcttcaaaactaattgctaactgatcgataattgcaaaatcgtgaatgaccaactcttgtaacatctgatcatccccctttcgtttctcttgatgctaaaaaaacttgccaaattactttagcaagtcttcaataaacttcgtaaactgtttagcattttcttctgatttacaaatcaccaacacggtgtcgtcgccgccaattgtaccaaatacaccactgagctgcatttgatccaaaagattagcaattgccgtcccgttacccggtaaggctttaatcacgacaaaatagtcttgttggttatgcgtaatataggcgtcacgtaaaatccgacgcaacttttctttaacgtctaatttcttttcaggcggtaggctatagtgatagccctcgtccgcatttggcactttaatgagctgcatttctttaatatcccgcgaaatcgtggcttgcgtaacatcgatgtcttccgcttgtaacagcttcacaaaatcctcttgtcgttcaatctcatgggtctggattaaattttttaacagtcgttgccgatctaccttgcgcattaaaacaccctcttcatgtgagaaattattctattcctcaatgatagcgcatttatacataaaatacaaagttttatacactattttcccgttggtcgtttcaaagcagcataggcattctctaaaaccgtatcaatattcatgtttggggccatcgttccagtctcagccgtcgtattccgtagatgaatcaagaattcaatattgccttcgccacctttaattggtgaaaaatctaaccctagcacgtcgtagcctgtcgctaaactaaaatcaacgatgtctttaaccaccatcttatgcactttcggatcacgcacaatcccgtgtttaccgacattttcagggccggcttcgaattgcggcttaattaaagcaaccgcttcgcagtccggtttcaagatgggtttcaacggcaccaaaatcttatgtaacgaaataaacgaaacatccgtcatggcaaaatctggtagaccattggtgaaatcttctggttgactgtaacgaaaattaacccgttccatcacgacgacgcgtggatcttcgcgcaatttccatgctagttggttataacccacatctagtgcgtaacagagtttggccccatttctaagcgccacatcagtaaagccccctgttgaagaaccgatatcaagtgcgattttatcctgtaaatcgatgttgaaaacctcgaccgctttcgccaattttaaagcccctcggccaacatacggaatcttacgccctttgacacttaaaacagtttcagcgtcgattttttcgcccggtttgtcgattcgttcatcatttttaccgtacacttcaccagccatcacagaccgttttgcttgttctctggaatcaaataatccctgttggactaataatacgtctacccgttcttttttcatctgttctcctattcattaaaatagtttaaaaaactatttaatagtgctttatctaacccggataaatccgttaaagcagtttgcgcggcctgacaagtctcatccaacgcgtcttttgcaccagctaagcccaataagcctgggaaagtattcttatgttcgtcagcatccttatggaccgccttgcccatcgcttctgtagtgcttgtcacgtctaaaatatcatcttggatctgaaatgccaacccataattttgcgcaaaaagctgtaaactagccatttgttcatcggataaatcagccaaaatcgcccctaagccgaccgcgcattcaatcaaacggcccgttttgagctgatggacttgtttcaattgagctaacgataaagttttagtttgtccttcgatatcttcaatctgaccagcaaccatgccacttggaccggctgcttgcgccaataatcgaacagtacggctctgctgatcagtcgtcaaatcggtcgtcgttaaccattcaaatgcaagtgtcaataacccgtcgccggctagaatagcttgcgcctcgccaaaaaccttatggttcgtaggttgaccgcgccgtaagtcatcattatccatcgccggtaaatcatcatgaatcaatgagtagctatgaattaattccaatgcccccgctacgcgatacgccgtttgattaatcggtcgccccacacttgcaagcaccgcaaataccaaaagtggccggagacgtttcccgccagccatcactgaataggtcatcgctttttgcaaggttggttcttcaatctgggcaagttgctcagtcaaataggtttcaaatgcgggcacttgttggcgcgcgaacgttttgaaatcaaccattattcttgtgcctcaacatccaatgggacttcttcgccattatctgccatcactttggccatcgttttttcagccttacttaaggtttcttctaatgtttgacttaatttaacacccttttgaaaagcagtcatcgctttttcaagtggcacatcgcccgtttccagttcattcacaattgcttccaattgtgctaagttctcttcaaatgttaatttcttttctgccatcttattcgtctcctttatgagtggccgtaacacgcgcgttcacgaggccatcttggacatgtaactcgattgattggtcgatcgtaaaatcggtcgtttttttcattacattttgattatcatccgttacataagcaaatccgcgtcccaaaattttcaacggacttacgagatccaaggctgccaccgcttgtccagcctgttgccgccgattttggacaaggctctcgattgctcgtttcaaacgatgatcggtatcagtcaacattctttgtgcttgttgaatcgcaccacttggtgattgcgactgcaggcgttgctgcaagagttgtacattctgttgactagtctgtaagcgttgttgttgcgccaacaataaacgacggtgcaactgatcgacattttgtaaatagccgtcatacaagcgttgcggctgttttaagacgtaactgttctgtaagtggaccaattgctttttgtttaatgccaatgttttcgaaaatgcctgatataaccgcaaacgttgttgttgcaacttcaacacttcgtccgtcaaaaccggtgttgctaattcagctgctgctgttggtgtcgctgcccggacatccgccactaaatcagcaatagtcgtgtccgtttcatgaccaactgatgaaatcaccggaatctgactggcaacaatcgcgcgcgcaacgcgttcttcattaaacggccataaatcttcaatcgaaccaccaccacgaccaatgataattgtatcgaaatccccttgttgattaacttgattcagtcgatcgactaaaatatcagccgcaccgtcaccttgaaccaccgctgggaataagacgagttgggcaattggataccgacgttgcgtcgttgttataatatcgcgaataacagccccagaaggactcgtaatcaccgcaatccgttttggaaagcgcggcaatagttgctttggtgcatcaaacaagccttcagccgataatttagcttttagctgttcataggcttgatacaatgcaccaagaccatctggctccatccgttccacatagatctgatagtttccagttgcttcgtataaggaaatccggcccacaacaagcactctcatcccctcttcaggagtgaacttaatcttttcaaaagcggacttgaacataatggcactgatcttagctttattatcttttaaactaaaatattgatgcgcattcggtcgtaagcggaagtttgaaatttcgccggttaaataaacccgatccaaatacggatcgcgttcaaatttagcctttaaatactgcgttaatgcggtgactgttaaatagtctgttggtttaaccacgtttagcacgttcctttgcaatctcaatcgtttgatccatgagcatcgtaatcgtcattggccccacgccacgcggaactggcgtcatcgcactaacatgtgatttaagggcttcaaaatcgacatcaccggtgactgttccatcttcaagccgattaatgccgacatcgacaacaaccgccccttctttgacatcctcaatgccgaagaagtgtggtttaccgatggccgccactaagatgtcggctgttttcgttagggcttttaagtctgccgttctgctgtgcgcaatcgtgaccgtggcattggcattgagcattaaagctgccaatggccgaccaacgatgttactccggccaacaatcacgacatttttgccagccacgtcaatatcgtgagctgccaataagcgcataatcccatttggcgtacaggccactaagcccggttgattaagccataatcgcccaatattgactgggctaaaaccatcaacgtctttttgtgggtcaatcgcccggataatatggtcttcattaatttgttttggtaatggtaattggactaaaatgccatcaacggtttcatccgtatttagttggcgaacaaccgctaataaatcagcttccgttgtttcagcagacaggcgttttaactcagatgccatgccaattttagtcgctcttttttgcttgctttgcgtataaatcgcacttgctggatcatcacccaccatgacgaccactaatttcggggttaccccttgttgtttgagtgttgccaccgtcatttgttgtgcttgtgttaattcatttgcaagtgctcgaccatctagtaattccaaagttaacaacccctatttatcgatatttgatgtttctattttagcatagttaatcggttaattccgggttatcagctgataatgaccgtttaaattcaaaaaaacacgctaaaaaaatactttttaacgtgttttaagtgatttcgttcgtattttactaattaagcttcaacgaatttagataaaacgccgttgataaaaccttttgcttgatcatctgtaaattgtttagcaagttcgagcgcttcattcaacgccactttatcgggtgcttctgttgaattttgcatttcaaacaaccctaaacgcaagataattaaatccggtttggctaaccgtgatagttgccagcccttcttcaagtatggcgttaaagcggcgtctaattctgcttgatgttctgtgacgcccgttaccaagaaggcaaggtagtctggaacagcaacttcttcaacttcttcagcatcgaattgatccatggttaaaacggcttggtaagcatctgccaattctaatgtgtcattagcatttaacgcaaacaacacttgaaatgcagcttggcgaatttggtgtcggttaaaattaggcattaagattggtctccattttgatcaggtgtttcatcgttaaataagtcatctggatcaataatttttggtgctttttcagtgacaacgcccaccacgtgtacgttgacttctgctagttctaaatcagtcatgaacaataattgttctttaagggcttcttgcatcgcaagggcaaccttcggcacagaaacaccatagttcagataaacataaacatccgcattcactttgccatcaatcaccttaagagttacccctttaccgtgattcgaacgaccaaacaattcgttaatggatgatgataacgtcccccgcatttggtggaccccatcaatcttgcttgctgcaatccctaaaatcacttccacaacttcaggtgccatttgaatcttgcccaatgcattttcttgtgtatcaagtacaatatttgtttcttctgccatcgaaacccctcctaacaagttcttgctaatttagcctatgcccgtgagatgtaactcccatcagatgtgttaatcgttaacaaatcaccttcgttaacgaaaaacggtacttggaccactaagccagtttcaagtgttgctggtttagtaccacccgaagatgtatcaccacgaacaccaggttctgttgcagccactgctaaatcaaccgtgtttggtaattcaacccctaaggtttcactaccatacatcatgatagaaacttgcatattttctttcaagtatttcaattcatcattgatttgtgctgctggtaattctaattgttcgtaagtttcagtatccatgaagacgtggttgtcaccatctgcataaagatattgcattgattttgtatcaatgattgctttttcaactttttcagttgaacggaatgtcttttcttgattggcacccgttcttaaattcttaagttttgagcggacaaaagcgccacccttacctggtttaacatgttggaattcaacaatccgccataggttgttgtcaaattcaatggtcaagccatttttaaaatcatttactgataacattgtttatcctccgagcattatataagtatgccattgtcctaatcatagcaagaaatcaggctcaaaagcaagtatttctagccttttatccctaaaagtagctataaaaaaagggaccggcacccgccaatcccttttagcgtattcaatcaagcaaaagtcgatctgaacactcacttttagattgtcaatggtttgttgcctgagtaattagtataccagtaaaactggatttacacaaacagagtgtgacatcagtctgggttaaccggagagatatgactgatggaacacgtttagaatgtgacgacagccccgcttctctcgcacaaaaaaacacccacacaaagtgggtgtttaaaaaattatttagcttctgcagcgtatacagaaacctttttcttgtttttaccgaggcgttcgaaacgaacgacaccttcgataagagcaaataatgtgtcatcgccaccgcgaccaacattttcacctggatgaatctttgtaccgcgttgacggtaaagaattgaaccagctgttacagtttggccatcagcacgtttagaacctaaacgacgacctgcagagttacggccgttagttgttgaaccgccacccttatggtgagagaagaattgtaaattcatttgtaacatctaaatgcacctcctgtttattaactgtctatttacgttttgtttgtacttgaatgtactgcccgtattgttgcgtaatatcttcaagcgtcaactgcaaattctgcaagagaatctgagctgtcgctaaagcttggcccgaaaccgttgccggaatctgacaagttaacaaaccaccattcaggttatctgcttctacctctggttcaaaaccagcaagcttttgcaaactgttgattgtcccgattgagacagcagaaacagctgcacagacgatatcactcccgtaaggacccgagtcggcatgacccgtaatttgaaaagaaataattttcgaatcggcattgaccgtaaagtcagcttgaatcatcttatttccctcaattaggcgttgatagcgtcgatcatcactttagtatatggttgacgatgacccttcttttgatgactgtgtttcttaggtttgtatttgaaagtaacaactttcttttcgcgcccttgtttttcaacagtaccatcaacagtaacaccatcaatggttggtgtaccaaccttagttgtttcaccaccaactaaaataacttgatcaaaagttactttttcgccagcttctgcggctaacttttcaacatagattgcttgaccagcttctaccttatattgtttgccacctgttttgataattgcgtacatgtgtgcacctcctattttttcttagactcgccaactaaggtgactaatcatagtacttaatgccttagtatgcgcggttgcagctgtggagctcacaattacaacgttcatattatatcgaatatcacagggcgagtcaatgctttattacgcctcgacaaaaaattgtgcgacatcgaacgtcgtattaggtgtttgtaccaattggtataacatcttagccatgtagcgtggtgaatacacaagcccgtcattgacccacttaaaggccaacgctaaactggcccccgctaaataatcaatcgtaatactcatctcaatttgatcagcctgtgaagtctgattatagcgcttagccacgtaatcctgcattaattggcgcattgattcagtcagttgtgcctgaaagtgaagcgtcgcctcatttttatagaacactttaaaagcagcttgttgttgttcaacatattcaaaaagtgcctgtaaactgacctgacgatatgtctgatcgaccactacagtcacttgctgataaaaatcggccaccaaatcggccaccgcggttcggatgaaatccactttatcttcataatggagataaaaggtcccgcgagtaattgccgcttgcttggtgattgcttgaatcgaaatcccctttggcgtactgtctttcagcaagataatgagggcttgacgtaattgttgctttgttcgttgaacacgtggatcttgcgctcgtaaatctgtctcacgaaccatctgatagttcccccaatcttttaattaaattcacctgtcgatagtatagccgctcagtgaaaagtctgtccattaatcggcttgataacggcccttgatcagttgaatatcccctagtgtacactgtaaatttgaagattctgttaacgaacacccaaaaagtaaactttatcccccacaaatttaattgttgttcgtctgcggttatagtaaaatgagcgtagtatttcaaatcggatagcgttaggtggtcgtcactttgatttctgcattcttcattattttcatttcaatcgttttattcgccgtcattgctagtcaattgactttcaaaatcggcttaatcacaaattgcgtgctctttatcattttagttggtgttgatgcttatctattcagctggggtagtggttctcactgggtgtacgttattgtcagcctactcggattagtcgctagcgaattattattagctgaactcccccatcttaaataattaggttaacgtcaaaaagcggtccaactcatcattgagttgaaccgctttttttagtgcccctgccaaggactctcagtataccatattaatcaagtaaggttgtttctttcacttcatcaattgtcttggtaccagccaactgcatggtaatcgataattcatggtttaagtgttcaaaaacagattgtaccccttgggcgccacctaaatttaaaccataaataattggccgaccaatggccactaaatcagccccacttgcgagtgctttaaagacatgttcaccacggcgaataccactatcaaaaacgattgggacgcgttttgcgacttgttgcgcaattaaaggcaacacttcaaatgaagcaggcccgccatctaattgacgcccaccgtgatttgaaacccagatgccatctgcaccagcttgaatagcaatttcagcatccactggtgattgaatgcctttaacaaagactggcaaatttgtgatttgtttaatcttttgaatatcttctggtactaatccttgtttagcggcagcataaatttcagagatgcccttcccagcaccgtcagaattactataagctgctaaattaggcattggtagtgggaattgcgtctcgatgtccgcttcacgataaccacccaatgttgaatcgacggtgagaataatggcttttacacctgccttaacggcttttttcaataagaactcattgaattgatcatctttactcatatagagttggaaaaatttgggggcatcaggagccgctgcggctgcatcttccaccaatgtattggcataggtactaattgagaaaatcgaaccagccgctgcgacccctttagcagtgtcgacttcccctttttcatgtgctaacccttgggttgctgagggggcttgaataatcggcgtttttaaatcaatatcccataatttagtatgtaaatcagcgtgatcgatgccttttaacacacggggcattatttttttagtattgaaagcactggtattttcagccatcgtccattcgtcttcagcaccgccacggatatagccaaacgcgccagcttccattcgttctttcacgcgtccttctaacgacgctaagtttaaaatatcgattggattttccgcttcacttgtatgatatcccatgatagattccttctttcaataattgaatacctttatcatggttctcttatcaaaagtaagcaaacatttatactcggttatttcacttgcgttcgaaatccaatgtcttgccggtaaaaagtcgtcggtaaagcgagttgtgctaaatcccgatagacctgttgactagctcggcctagcgtctcagcagaataactagcggtatacaaacgcccgccagcgctgaccaattgattggcttgttctgcgacactagcgaaactaaatgtgctgttgcgttttgcaaattgttgcaaagtgggtaaaacaaacggcgttgtcgattgtgtcgggtaaccatctgaagccaccacaacacctaacgtaatgcctgataattgccactgtaacgttggggtttcccccttcaataattgtgcaaaaacttgggcccagtcgcccgtcatccgtggtagcaccacttgtgtttcaggatcaccaaagcgcacattaaactcaatcactttcaccccgtgttgtgtggcaattaagcccgcatacaagacaccggtaaaaggcgtttgacgttcagccatcgttgccacaatcggttctaaaatagtcgttaccgcttctgcaacgcattggtcactaatctggggtactggacaataagcgcccatcccacctgtattaggcccacgatccccgtcaaaggcgcgcttatgatcttgagcaaccggtaatggatagacgcgattattcgccaccaacgccatcagcgagaactcttcaccttcgagataatcttctatcaataactggggcacgccctgttcaaagaacgcctgaacagtttgccgcgcgctcacgtcattttgagcgatgacgacgcccttgccagccgctaaaccatccgctttaatcacaacgggataacgaacgtcatcgagggcatccagtgccgcttggacagtctgataggcttgataagccgccgttggcacatgcgcggccgccataatttctttggcgaaagttttagacccttccaatgccgcagctgctttacgcggtccaaagatcgctaatccagcgtcttgaaaagcatccactacgccagccactaacggttgttcaggcccaacaatcgtataggcgacctttttggcctgcgcaaaggcaatcatcgctgcaaagtcagtcatctcaatcgcaactgtttgaatcccatccaattgcatccccggattgcccggcaaacaatagaccgttgcaacagttgaactctgctgtagcgcacgcgcaatcgtgtgttcacgcgcgccgctaccgattactaatagatccatgatttgcctcctattggctagtgtttgaaatgacggcgaccagtcgtcaccatactgattcctttttggttggccatgtcgattgaatcttgatccttaatcgaaccaccaggttgaataacagctgtcacaccatgttctgcggcgtattcaacgctgtcatccattgggaaaaaggcgtcagatgctaagacgaacggtgcttttaatccattggcttccgcttgttcgattgcaatcttcacagagcccacccgattcatttgccccgcaccaatgccgagggtttggtcctttgttgcgaccacgatagcattactcttaacgtgtttaaccacacgttgggcaaataacatcgcagcttgttcatcagccgttggtgttttgtccgtcacaaccttcaattcagatgcttgatcagtcacccgatcacgttcttgcacgagtaagccgcctaaaacagaaaccatttcgaagcaatccgcttgcttagcagcctcaaaatcaagcgtcatgacgcgtaaattcttcttcttttctaaaatggctaacgcttctggggtgtagcttggtgcgatgataatttctaagaataaactatgtaattcttcggctgtttgaacatccacttcacgattcaaggcaatgatccccccgaaaatcgatactggatcggccgcgtaggctttttgccaagcttcatagatggttgcacccaagccgacgccacacggattcatatgtttcatcgcaaccacacaaggttcgctgaattctgagaccactttaaccgccgcatccgcatctttaatgttgttatacgataattctttcccgtgtaattgtaccgctgaggcaatcgagaaagccgttggtaaactgctttgatagaacgctgctttttgatgggcattttccccatagcgcaacgcttgtttaaagtcgtatgaacgtgttaatttttcagggaattcgatgccgactgcttcggttaaataaccggcaattaagctatcataagctgccgtgtggcggaatgccttggctgctaaataacgacggtaatcaaccgcagcttgcccctcatcgacgacgtgttcgaggacttgcgcgtaatcttgttgatcaacgaccacgtacactgatttaaagtttttagcggcagaacgcaacattgaaggtccgccaatatcaatttgttctacagcttgcgcttcagtaatccctgatttttgaattgtttctttaaaaggatacagattgacacaaactaaatcgattgtctggatgtcatgggctgctaaagcggccatgtgtgttggttcgtcgcgtttggcaagcaagccaccatgaatattgggatgaagtgttttaacccgtccatccaacatttctgggaaatgagtgacttcatcaatcgcaattactggtacttgcgcttcttgtaataccttgaatgtcccgcctgttgagatcacctcgtaaccagctgctactaatcctttagcaaattcaataattcctgttttatctgaaacactgaccaacgctcttttcattgattgaattactccttctattttggtttttaattaattcagcaacaacttgcggataaatcgcgtgctctgtatcgtgcacgcgttgttccaatgcggctaaactatcgccaggcaacaatggtacttttgcttggacaatcatcggaccgctatcgacaccttcatcgatgtagtgaatcgtaacgcccgtttcagccacttgtgccgcataggcccgttcaatacttcgtaacccagaaaaggccggtagtaacgacggatgaatattgataatccgttgtgggtaggtatgcaacaatactggggtaatcacccgcatataacccgctagcaatatataatccaactgtaacggtgccaacagcgcgacaattgctgcttcatagtgttgtcgatcatcataatcacttaagcggatgaccgtcaccggtacatttcgttggcgcgctttttcaatcaccggtgcgcccggctggtcacacactaagttcataatctccatgcccgctttttttaaggcgtcatcatctgcaagtacttcaaagttagaacccgttccagaagcaaaaatcgccactttcatctcatcaacccaccaattctattgcattttcttgtcgcggtttaaccgacccaattcggtaagcctgttcttgttcagcgttcaattgggcgagaacttgtgccgctttttctggtgcgacggctaagaccatcccgatccccatgttaaaaatgttatacatctcgagtgcatccaattgcccatattgtttaagtgccgcaaaaatcggtaagcttggccatgttcccaattgaatttcggccatcacgttgtcaggcaacatccgcggtatattttcaataaagcctccaccagtaatgtgggccgcgcccttaataaagccttgttcgatcaacggctgacatgcttgtgtataaatccgcgttggtgttaatagccattcaccgagtgtctgaccaggcaattcgggtaagtgactgtcgacggacaacccatgttgttcgaagaaaatttggcgcacaagtgagtagccattcgaatgaatcccactggacgcgattccgattaatacatcccctgtttgaatcgtttcaccagtaattaattgagcttgatcagcaattccgactgcaaaacccgctaaatcataatgtttttcagcatacatacccggcatctcggccgtttcaccaccgattaacagcatgtcagcagcttggcagcctgcaacaacgccgctgacaatttgttcgatcttatccggctgcgtttgaccagccgctaagtaatctaagaaataaagtggcttagcgccttgggcaacaatgtcattgacacacatcgcgacacaatcaatcccgatggtcgcgtgtgcatcagctgcaaaagcaaccatcaacttggtcccgaccccatcggtacttgaaacgagcaccggattttcatactgccccatcgctaaggcaaactgaccaccgaagcgaccaatattttgattggttgcgccgacctgcttttgaatccgacgaaccacttcgtaaccggctgtcacatccaccccggctttttggtaagcatttgtcatgattgttgctccttatctgcttttaaacttgcctgataggcagcttcatagtcataaagtggcgttggatagtcgccgttgaaatacgccatacataatccggaatacggcgcatcttgctgtaacccaatcgcgtcgattaatccctgttcactcaaaaagccaagtgaatccgcgccaatcgtggcacacatctcagcaatactttgatgcgcggcaatcagttcatcacgtgtttgaatatcaatcccataaaaacaagggtacttcaatggtggggacgcaatccgcaaatgcacggataatgcgcccgcttctttcaaacgtttcacgatgtgcttgctggtcgtcccacgcacaatcgagtcatccactaaaacgattcgtttaccagccacaacacttttaaccacggcgagtttgcggtttaccccttgttcacgaagggattgcgttggttcaatgaacgtccgccccacgtattgatttttaacgaggcccatttcatacggcaaaccactttcctcggcatagccactagcggccgataacgatgaattcggcaccccaattaccatatccgcatcaactgcggtttcgcgtgctaactgtttccccattcgtttgcgggccgcatggacgttaatcccacagatatcagaatccgggcgagcaaagtagatatattccattgaacagattgaatgcgtggtttcggttgtgaagaagtcagaatgtaacccgtccgcatcaatcgtcacaatttcgcctggctgcacatctcggataaaagttgcttgaacggtattgagcgcacaggtttcactggccacaacgtagcccccgtttgctaaacgtccaatcgagagtggtcgaaagccgttgggatcaagcatcgcaatcaatgaatcttgcgttaataataggtaggcaaagcccccacgaatttgttgaagggccgtcttaatttgcgcgtgcaaatcaggcccttctgcacgtcgaatcagatgcatcagaatttcagaatcagagctcgattttaagatggcccccgattgttcaagcatgcggcgcagtgtgaccgcgttggttaaattaccattgtgtgcaagtgcgaattgatcggttgcaaaatcgaataggaacggctgaatattttctaaaccgtgactaccagcggtcgcataacggacatgaccgattgccgcgtccccggttagttgggttaagtgctccggtttgcggaaaacatccgccaacaaaccacgattgcgataacccattaagtgcccgtgatcattagtgacaatgccggcaccttcttgcccacgatgttgcaaactatgcaagccaaaataagtcatttggtttgcttctggactaccccaaatcccaaaaacaccacattcttcatttaaactttttatttcatttgacatggtatcgccgtctcccaacttaacttcgcttcagtcaccgataactcaacagttgattcagtcgtttgcacttgcataattggcgtggccgagaccgtcccaattaattgcgcctgatcttgacagaacgcttcaaacgccgtctgattttctggccgaaccgtgatgataaagcgggattgcgtttcaacaaataactgttgttgattaagggggacttgcacgcggcagccgagttgttctttaaaagtcatttcggctaacgcaaccgcaaaaccaccctctgataaatcatgtgcactagtcacccaccccttttgaatcgctgctaagacgcaatcttgactcgctttttcagtggctaacgaaaagccgcttaatcgtcctgcaactttgcccgtcaacatattttggagttccgaacccgctaaattcgtatccgtctggccaacgaggtagattaaatcccccgctgacttaaaaccttgcgtcgtgatgtcggctgtatctcgaatcaaaccgaccatcccaatcatcggtgttggataaatcgcttcgccattgaattcgttataaaaagaaacattaccagagatgaccggcgtatcgaaaacctcgcaggccgccgcaatcccttgggcactttgatcaaattcccagaatacctctggcttttccggattgccatagttcaaacaatccgtaattcccagtggttggccccctgccgcaacgatattccgtgctgcttcggcaactgccacttgcccaccgacttttggatcgaggtataagtaacgcccgttacaatccgtcgtcatcgcgagcgcttttttagtcccacgaattcggacgaccgccgcatcgcttcctggtaaaacgacggtattggtcttcacttgtgcatcatagtggctgtatagcgagcgtttgtcagcaatcgtggattggcccaataaatcgagccatgttcgtttaacatcattaatcaccggctgataaggcgccatcgctttaaattcagcgatgcgtgctggttcagtttgtgctttatgataaatcggcgcatcactcgttaaagccgccactggcaaatcggccactaattgcccaccatgccacaattgatattgttgactctcagtcacttcaccaatccggaccgcatccagatcatatcgttcaaacaaggcaaccacatctgtttcatgaccagctttaacacaaagcgccatccgttcttgcgattcagaaagcatgatttcataagcggacatctctgtttctcgttgtggcacaagatcaagattgagaatcatcccagtacctgccttttcagccatttccgctgttgaagaaactaagcccgccgcacccatatcctggatgccgactagccaatctggatgcttcaaaattaattccaaacaagcatccattaatagtttttccataaacggatcacccacttggactgctgagcgttgggtcgccttgccatctgcaaattcatccgatgcaaaagtggccccgtgaatcccatcgcggccggttttagccccgacgtagaacacactattgccagcaccacgcgctttaccttgctgaatatccttttggtcgatgacaccaacgcacatcgcgttgacgagtggattagtctgataacatggatcaaatccgatttcaccaccaaccgttggaatcccgatacaattaccgtacccgccgattccagccacaacttcttgaacaaggtatttcgtgtggtcatccgtcaattcaccaaagcgcagactgttcaaaagcgcaatcggcgtcgcgcccatcgaaaaaatatcccgaataataccgccgacaccggtggccgccccttcatagggttcgactgctgagggatggttatggctttcagctttaaagaccactgcttgaccatcgccaatatccaaaatcccagcgccttcacctgggccttgcaacacgtgctgaccacttgttggaaattttttcaaaaccggcttcgaatttttatatgagcaatgttcactccacatcactgaaaataacccggtctccgtataattcggcaaccgttttagaattttagtacgaatcaattcatattcatcatctgataacccccattgctgataaagcttggtggcttggatttctgccgctgttggttgctttaacacggttattgccctccttttcgaatcgatgtgattaatgctgcaaataaacgttgcccatcatcgctacctaataaggtttcgactgcgcgttctggatggggcatcatccctaagacattgccggcttcattcgtaacgcccgcaatattcgctaaactaccattcacatcattttgataagtaaatgcaatttggtggttcacttttaaccgttccagggtctctgcatcgcaataataattcccttcaccatgagcaatcggcaaccgaatttgttcgttcggcatatagtgttgggtgaacatcgtaccggcattggtcacgttcaacgcgactgtgtcacagataaaatgggtttgtcgattcggcaaaagaacgcctggtaataacccgagttccgttaaaatttggaacccgttgcaaataccgataaccggtttgccatcagccgcaaacgccttaactgccgtcataatcggtgccaacttggcaatcgcaccactgcgtaaataatcgccgtatgaaaagcccccgggcactaatacggcatcaaaacctgccaggctagttgctgtgtacgggatatactcagcgttttcatgacaaacatcttcaattgcatgatataaatcagcgtcacaattggaacctgggaaaactaatacggcaaatttcattgattcgtcgccaccttttgtatgtcgtagtggtattgttccatattaggattggctaagagttgatcacagatttgtacgacctttttttcaactgcggcttggtcatcgccagccacttgcatttcaaaggacttgccaatgcgcatgccgctcacaccatcaaagccaagtcgttcgatagctttttggacagcctggccttgtggatctagcaccgaatctttataagtcacttgcacacgcacattaaacatctgtagaaccccctaaaattttttctaatcgtcgtaatacgacatcgtacaccgatactaaatcccctttgttcaagcggaaaacatccttatctagcgattcatgcgtcgtttgatcccacagacggcagttatctggggaaaattcatccgccaaaatcaagcgaccgtcataccggccaaattccaacttaaagtcgattaaatcgatatccgcacggtcgaataaatcgattagcagctggttgatctgcttagtttgtttttcaatcacttcaatttccgccggtgtcacaattccaagcgcggtggcttgcgaaatattgatggctggatcatctagtgcatcatttttgtaatagtattcgataatcggcgtggccaatcgtttgcccggtgcttgaccaaacttgcgggcaaaactccctgccaccacgttgcgcaatactacttctaggggcacaatcgtcactttcttgacgagctgttcagttgctgaaatattctcgattaaatgcgtttcaataccatttgccatcaagtatttgaaaattaatttcgaaatctgataattcaataatccttttcccgtaatctgttccttgcgtttgccatttaacgccgttgcttggtccttatagaccattctcaacacattttgatcgtcagttgtaaaaacatctttcgcttttccagaataaaacaacgtctcactcatgcttgaatccctccaaataacatacattttatttaaaattaaaataatcgttcgtgttacattagggtgtaaaaaaactttgaaataacctcatttcaaagttttcatcattattcgcccaaaccaacgcggtcaaagatttctgcgacgcggcgaatatggtaatggtaatcaaacgcgtcgtctaaatcagcgggcgtcaacacattcataatccggtcatccgcttctaacaacggtctgaaatcagtttgttgatcccaagcttgggccgttttaggttgaatcaagtcataagccgcttctctcgaaagcccatgatcgattaacttcaaaagaacccgttggctgtaaatcaacccgaaagtccgccccatattacgcttcatattttctgggaagactgtcaagtccgtcataattttggtgaaccgtcgaagcatataatccaacaaaatcgtagtatccggtaagatgatgcgttcggcagaactatgcgaaatatcacgttcatgccagagtgcaacgtcttcatacgccgttaccatgtgtccgcgaatcacgcgtgccaagcccgtaatattttcagaaccaatcggattccgtttatggggcattgctgatgagcctttttggcctttcgcgaaaaattcttcgacctcgcgggtttcagatttttggagaccccgaatttcagtcgcaaacttctcgattgaagttgctagtaacgccatttcagccacgtaggcagcatgcaagtcccgtggtaagacttgtgttgagatttcttgggcgcgaattcctaaatgttcgcacacataggcttcgacaaacggtggaatattggcaaacgtgcccaccgccccactaattttaccggcttcaacgccttttgcagctttttcaaaacgtgccttatgtcgttttaattccgaataccatagtgctagcttcaacccaaacgtcgttggttcagcgtgaacaccatgcgtccggcccatcatgaccgtatcttggtaacgtttggcttgtttggcaatcaccgccaatagcgcatcgatatcggcccgcaaaatggcgttggcttgtttcaacaaataaccatacgccgtatccaccacatcggtcgatgttaaaccatagtggacccacttgcgttcatctccaagtgattcagaaactgctctggtgaaggcgacaacatcgtgccgcgtttcctgttcgatttctaagatccgtggaattgagaacatcgcattggcacgaattttcgcaacatcttcagccggaatgtgtccgagttctgaccaagcctcatccgctaaaatttcaactgccagccatgcctcatatttattctggtccgtccaaatcgcacccatttcaggatttgtataccgttcaatcatttattagcgtcccctctagtcccaaattttagtctttttaattgccgttaacgtttcatcaacagccggcgttaataacgtgacgtggcccatcttgcggttgaccttttgaaccactttgccatagtcgtgataatgccaatctgctgactgccgactggctgttagtgctgcttgccagtgctgcccaagaatattgaccattaccgctgattgccacaattgtggtgtttggagtggccagttgcagacgccccgaatgtgggttgcaaattgagaaaagtcacacgcttcaatcgttagatgacctgaattatgcggccgcggtgcaatctcattaacgtagagttgcccgtcatggccgacaaaaaactcgacacctaacgtgccgactaattcaatctgcgtggcaatttttgccgcaaccgattccgcttgtgccgctaacgccgctgaaatgcgcgccgggcagatgctgatatgtaaaatgttatctcggtgttgattctcgattgcgggaaaaacggcttgttgcccggctgaattctgactaattatgaccgaaatttcttgatcaaaatggaccatcgcttctaatacacaaacactagcggttaacaactgttgagccacctccatatccattgcggaccgtagaatgacttgtcctttaccatcatatccaccgcgcgtggtcttcaagatacaaggaaaaccaacttttttaacagctggtattaattctgcaggggtcgttacaatctcaaaggtggcatgtggtagctgttggtcaacaagaaattgtttctccaacaatcggtcttgagcaatccgtagcgccttcgtcccttgaggaatccatgtatattctcgggcagcttcaatcgtcttagcatcgacgttttcaaattcatatgtcaacacatcgacacgttgcgctaacatcataatttgtgcctgatcatcataagctgccacaatttgatcatccgcgacttgtccggctggacagtctgcctgcggatctaagataatcactgcaaaccccatctctttagccgctaatgtcatcatctgacctaactgaccgcccccaacaatcccaatcgtttgccctggtaaaatttggttagtcaaagtctgcattacttgccaccgcctttgcatgcatccgtgcttgatactgttgcagtgccacttgataagctgggacctgcaagccacaaatctgtgtcgctaaaataccagcgttaacggcccccgctttaccaatcgcaaccgtcgccactggtacgccacctggcatttgcacaattgataataaagaatccagcccactaagtgccttactttgaattggcacgccaatgactggtaagactgtattggcagcaatcatccccggcaaatgtgcggcaccacccgcaccagcaataatcgcacgatacccgttcgcctgtgcttcttttgaaaaggcgaacatttcatccggcatccgatgagcagaaataatctgtttcgtataactcacgcccaactccgataatacagaagcggtctgttccattgttccccaatctgatatagagcccataacaagtgccacatcactcatattctttgcccactttctcgttgttgattatgctttgattctaacaatcttcatctgatatgtcaaaatattttacgaactattttatataaatacatttaataattcgtatttaaatcataaatacacaaaaaaaacgattaacctgttggttaatcgtttttttatcgttatggcaatacaacgaagagtaatgcacctaaaatcccaccgatgattggaccgacaactgggatccagctgtatgaccagtctgaatcacccttgttggcaatcggcaagactgcatgggcaatccgtgggcctaaatctcgagccgggttaatcgcgtaaccagtcgtcccaccaagtgatagaccgattgctgtgataaccaccccaaccactaatgggttcaaaccggctgttaattcaccacgtgttaatgctagtaaagcgaagattaagacgaatgtcccaatcaattcactcattaaattggcaaatgggctgcgaatcgcagggccagttgcaaaagtgcctaagattgctgcttgatctttagtagcttgccaatgtggatagtattgaatccaaacgacaactgcgcctaagaacgccccaatcatttgggcgataatgaatggtaccaccgctgcccaaggggtcttgccaatcattgcaaaagcaatcgtcaccgctgggttcaagtgtgcaggtcccataaatgcagaggtatatacccctaaagtaaccgcaaagccccaaccaagcgtgatagcaacccagccagcaccgttggcttttgtttttgctaagctaacgcccgctacaacgccatcccctaaaagaacaaggataaacgtcccaacaagttcaccaagcgcctgaaccattattgaatgttccatgagatttcctccaagttaagtcctattttaaatagtctaattgtgcttcaacaattgctgaatccaataattctgtttgacgtgctttttcagcgtcatcccagttcaataaacgcgccatttcatcaacaactggttgtttgatggctgctaattgatcattgtggaataagatgaagtttgtccgtcttaaaagataatcaactggtgttaatgtcatttcttcgttaactgagtatcttaagctgattgtttctttcaagttcaagccttcagcagcaccttggtccgcgtatgaaacaacccggctgacgtttgaaccgaagcggtttgctaaatcaatcgcatcttcttcatcaatccctttgttcatcgcaacttttgcatagaatttaagggtatcatccacgttatttggatcgaagtgcccacctgaaacttgtaatttcttagaatcgatttcacgaactgtttcattgaaatctttcttcaagatatcccggattaattcaagcgcaccggctgccatcttacgataatcagtaatcttaccacctgataaagtgattaagccgttttcagccactttcaaatcactaccacgagaaacttgtgatgggttgactgattcttcagcatgcgccgttcttaattgactgattgctttttcaacatctgcacgagcagctgttttgttttcgtaatcatcaactgtcttgattaagttgttgaatgattcttctgaaaccttaccgctattagcgccaccaccgttataatcggagctaccgttattagaaattaatggtcgtaaacctgcccagctagcttcaatatcgtttaaagcgatattaacgctaggatagcgattgttgattgcttttaagaggtaatcaacgtctgcttgttcaacacgtgggtgtttgaaatcgcctgtgtaatcagtatcagttgtcccgaagtacgtcttaccttcgcgtggcacaacgaaaatcatccgaccatcatgtaagcctgaatcgaagtaagttggttgtggcactgataaacgactactatcaacaactaaatgaatccctttagtaggacgaagtgtttcttgtgctttgacttccgtgtttaaagcatttactttatccacccaagggccagcagtattaatgactaatttggcatgaatatcgaatgtttcatccgttaattcatcgtgtgctttcaaaccgtttacgcgaccgtttgcatcataagtcattccgactgctttaacgtgacttgcgattgatgcacctaattcgtcagcttctttaatattttcgatgactaagcgcgcatcattattgacgaaatctaaataaacaccagcacccatcaaacggtctgacttcaagccaggttcgcgttggagtacttctttacgatcaattgtatagttggcatattgtgtaccagttacccctgccaatttatcgtataaatccatggcaatcttgacactgaacatgtcgtaagttgcttcaggttcatcatagattggtaaaagcattggtgtaggccgtgggatgtgaggtgcaatcccttgaacaacggcccgttcactaacagtatctgcaacaaccccaacgtcgaaagtctttaaataacggataccaccgtgaactaacttcgttgaacgtgatgaagtcccttcagcaaaatcttgcatttcaatcaaaccggttttgatgcctgatgcagccgcttgaatagcaaccccagcaccagtgatcccgccaccgattactaataaatcaagttgttcgttctttaagttattaattacttgttgacgtccttctaatgaaaatgtcattataatcctcctcattcacgcattttatatggtcgatgtttgaaaacctttgttgcttcaactgcttgttgccaaccagcatagagatcttcccgttcttcttcaggcatttctggttcgaaacgttgcccaactgagaaaatatgcgccaattcgtctgtatcttgccagaaaccaactgctaaaccagccaaaaatgcagcccccattgcagttgtttctaaattagctgccttttcaatcgagctattcaaaatatctgcttggaattgcattaaatagttgttgtttgcagcaccaccatcaacgcggagcactttgatatcaatgccagtatctttttgcatggtttgaacgacatcccgagtttgataagctaatgattgcagtgttgccttaataacgtcttgtcggttcgtcccacgcgtaatccctagaattgaaccacgtgcttctgagtcccagtatggtgcacccaaacctgtaaaggcaggcacaacataaacttcatttaaactggttgaagccttagcggctgcttctgaatctgatgatttttcaaccagttgcatactatcacgcaaccattgaatggctgaaccagcaacgaagactgagccttcaagtgcatagttgactttaccattgattgaataaccaattgtcgttagcaagttgttttctgacattgttggtttttcgccagtattcatcacaataaatgaacctgtaccataggtgttcttaaccatccctggttggagagctaattgaccaaataatgcggcttgttgatcccctgccatccctgaaattggtaccgtgctaccatagaaatgataaggtgctgtttcaccataaatttcagagtttgaccgaacatcaggtaacatggcccgtggaatgtttaaaatcttgaggatttcgtcgtcccaatccaaatcgtgaatgttaaacaacattgtccgacttgcatttgtatagtcggtaacgtgtgaagcgctacctgttaacttccatgtaatccaagtatcgatggttccaaagaggagttcgcccttttcggctcgttcttgtgcacctggcacttgatctaaaatccaacgaatcttagtcgctgagaagtaagcatcaattaatagccccgtcttttgatggaataattcttcatgcccatctttcttcaattgttcggcaatgtcatttgtttgtcttgattgccaaacaaccgcattataaattggtaaaccagtttccttatcccaaataatagttgtttcacgttgattagtaatcccaatccccgcgatttgatggggttgaatccccgatgatataaaagcgtttgcaatcgtcgataaaacagcgttccaaatttcgtttgcattatgttctacccagcccggttcggggaagtactgggggaattcacgctgtgcatcggcgactttttgaccattgtgatcaaaaatgattgaacgagtactggttgttccctcatcaatcgccaaaatgtatttttcagtcatcttaatcctcctttaacaacaatgttaggaaaacgtttcctcgaaaactattatagattaccgatgtccaaaaagaaagcgttttacccaaattaaattttacacaatttaacatccttaccaattcgacatttgtagcacatccaaaattaaaaaacgggtcaataatctcagatcaacactaattaaagtccttcatctgaatcattaaacccgtttttttacttaaatcgttgcagttattttagtatataattcaccgttcatcttgctgagcgaaaccttttcgttcttttcgtttgaaaataacacgatatagattcggccaccgtggctaaatccgttcgacacattccagcctgacaaataaccacgattaacaatgagtgctggatcattgtaaaagcccattccatagtgggacgtactccctggttggaacatttgagccttactctgttcattaattaattttccagtccacaacgcgcggtcaaaacggtacatatcagtcgccgtcatatacatatctccgacccctggtagttgcgtgaaattggggagttgtcccgcagcgccatttgccagatagccaatggaagccgctggtaatcgcgaatattgatccgtcatgaaaccagtgtgcgccattttacttggttttagaattttttcttttagatacgttttgtaatcttgatgactcactttttccaaaaccttcgtcagcacaatatagttcgcatccatatagtgccacttgcccggttgttccttaatcccatttttaataatttcttcgattaattggtcgagagtcttcgtctgattatcttggtcccgaccgacaatgcctgatgtatgatgtaaaaaatcagtcagtttaatctgctgcccattcggaaagtccgggaggtaccgactgattggatcgttgacgtttagctttccttgttcttgtaactgcaataaactcgttgcaatcaacgctttttcagttgaaccaatcgcatatagcgtatctggcgtattcaccaactgcttggcccgattagcactgccgtaccccttatccaacaaaacttgcttatcgcggacaattaacgcggtacctgaaaagccaatttgctttaagtagtcatctaacgcttgttctgcaacaattgtcggttggctttctgctttaagtcgttcttcctttgctttagcagcagcgactttttgtgattcgcgctgtttctttgcttcttgcgcttgtcgttggcgcttaatcttggcttgttgttgcgcgatttttacttctcgttggtgatgttgtcgctgaaccacaattccgcccgctaccagaccgaatatgaccagaataccaatgacaccaccaatttgacgccctttttttgacatcaactgtccctccgaaatttctaatctatccattaatttattacaatattaatgtacaatacgcttttggatttgaacagtgacattattgtcatctaaccacacgcaaaaaagcggtcgcgacaaaaaatgtcgtgaccgcttttttggaaccagacgttcttatttaactaataaaacattcgttgcagcatgggcactaacatattgggcaaccgatcccatcatcattcgttcaataacccctttccccgtaatccccaacatgattaaatcaatcccatattcttcaggaatgcgaatcgcaatttcttttttcggtgagccgacttccagaatcggggtgaccttcgttagcccatgattattcgcgtaacgaatattagccgctagttgctccttcacacgatctttttccatcgccgtcatcttcgcatagacactagcatccggtgaaacatagactgtacttggaataatatgagccacataaagctcagcatcatttcttttcgcaacttcaacagcttccataaatgccttgttcgctaagtcagatccatcgaccccgactaaaattttcttatacgttgtaatcatttagcaacaccctcctattaatgaaatgaatgcgaatcctaactatatgttcatcatactgaacccaataggaccttgacaatttaactgcctaaacaaaagacatatcgttaatagctatagtaccgtcgatggtgcacgaattcgagttaaagaattggtatctctaaaaagcctaatatatactgaccctaagttaattaacgaaagcacttaatagctatctcatgcactcatttctaaatcaatcaacttaaataataatttgaaaaagaaaggactgtcacatatggatattgtaataaccggtggaacatctgggattggctatcgcattgccaaagatctcattgcagaaggccatcaagtcattatcgttggacaggatgcggcaaaaggccgggcttctgtggcccaacttggaaaagcggccttttttatccaagccgatttagcgaccaaatcaggacgcaaccaagcactggcaagcatcaaatataaagtggataaaatacacgttctagtgcacactgccggtgttttccccagctcagcagaagaaaatattaaggctaatttagtcccccattatcagctaacaatgggcttagcagaccgattaactggcggtcgcgtccttatcataaccggtgatccgcaaatcattcaacaactcagcatttgcgaagaacaggagactactttacaacgtgcaaggtggttattaacccataaagctttattaaccctctttctcagttattttctggctgaaaaagagattacggtcaattcatttttcccagggaatgtcaccgatgagctaccgcattattcccaaacattgctgcatactgaagtgccagttggaaaatacttagcactccatcccgatctaacgcagagcaccggtaatttttttgataatgatcgcaacttggtgttactcaatgctcggcaatacaactatgataatgccgaaaagcatttgttacagtatttaacagagtaattgagactataaaatcgcttatcattagtggcaacatgagaatattattttccactaaactaaaaaaggacctgagacagtttttgtctcaggtccttacttatttgattgtataaaaaaaccccgcggatgcggggcacaaatattaaagtttaacgatgtttgttgcttgaggaccgcggtcgctgtcttcaacatcaaatgatactgcttggccttcgtctaatgacttgtaaccgtcaccttggatagctgagaagtgagcaaatacgtctttgccgtcttcaccagtgataaaaccaaaacctttgtctgcgttaaaccattttactgtgccgttgttcataataatttcctcctgatacatatcaatgtacgttttttgttgcaataaattattgataggtaaaagaggaaggtattgtgcatccaaaactcaaattacgtttcaaaatttgattacttgaacagtatagcatggcattttctaattagcaacccgcatcccaaaactatcgactaaatcgctcgcaattcattcgcaaaaggctattaaaataggctttaaagcgcataaactttttatttaaatatttaatttctaatcattttcgaaccgttttgtaaactttgcctcgctaagtgccatcaattcctcaggctcaatttcatatttcgaacagataatgagcagttggtcgaagcaatcggctaactcctcttttaagttagcttgcttttcaacgtcgtttttaacttttttccctgggtgatcacgcccaagttcaatcgttctaacggcccgtgacaattccccaagttcttcactcaagaagttcaaccgaattaatggtgaaaatcgataccaattccgttgttgataaaaatcaactaaccatgtttgatgcgcttttaaataatcttgcattttacattcactccatcattaaaaaaacacctaacctcgcaagcaatgtgcgaaattagatgtctccaagaattattgaatgtcacaggcgagattcgaactcgcgacctacggtttagaagaccgttgctctatccagctgagctactatgacctcattgattgacggtttttgctgtcagaataccacacaacatgctatattataagcaattgaagtagtcactgtcaattaaaattcgcagaaatgagggaaaaacatgcaattaaatcagttttcacgcttaactaaatctcaatctgaacaaatcacggaattacagcgtattcatttactcccaaaggatttcacccagctccccttccaagtccttgcccaagatatttttcaacggctgttcccagaagcacatagtcaatcaacccagagcgggcaacttagtttattacaagccacaaccgaattaaatctaaccgcctaccttgaaaccattgatacttcattcgatcaagttgtcttctataatgtcgccctccaactcttgggttttgaaatgacaaccgattttgaacttgatcaacccactgcttttatggccgccacaaaactcccatttatcgatcaagcggcatttgatcagaccactttcatcgaagccctttatctcctattaacgacgcgtagccaaactgggttactttatctggatcaattggctaaccgtggtttttttgcagactggcaaagtgatcagccccaatttctcatcttcaatggtaaggtccagcccgttttcgataccagccatttaattcgagaagtcgtttatgttgaatcgagcctagatactgatcaagatggccaacgcgacttattagaaacgactatcttcagaccacgcgaaactgaagcaggcttaaaaattccggcactctacactgccagtccttactataaggggattaacgacgtcgatgctgatttgcacaatgttgatactacaattgcgactaaacccgttcaacaaccaagcttagctgatttaacccaaacgccaaccactgcaccgcttcctcaacctcgcgccgttaatggcacaagtatgacaactgaattaaacgcaacagatgacagcaattacagtttaaatgattactttctggcgcgcggatttgcgaacgtttacgctggcggcattggcacacgcggttccgacggcgtccggacttgtggctcacctgaagaaacagcttcaaccacggctatcatcgagtggttagccggtaatcgacgagctttcaccaaccgcaccgatggcattgaaattaaagcttggtggtgtaatcaccaagttgcaatgactggtaaatcctaccttggtactttagccactgctgctgcaacaactggcgttgaaggtctgagaaccattgtagctgaagccgccatttccagttggtacgattactaccgcgaaaatggcttagtggtcgccccaattgattgtcagggtgaagatgccgatgtcttagcgaagttgtgccaaacccgccaaaaagatgccgctgatcatgcgctctctggcactttcttcgccgaccaactcaaagccctgcaagaaggtcaagatcgcatcacaggcaattacaacgccttctgggcagcccgtaactatcgtgacaatctcgccaacctgaattgcgatgtcatcttagtccacggattaaatgattggaacgttaaactacaaaatgccggcgccttgtgggatttattgcgcgatcaaccggttaataagaagcttttcttacaccaaggtgaacatatctatatgaataacattcagtcgatcgatttcaccgatatgatgaacttatggttcacgcatcaattactcggcgttgagaatcaggctgtcacaaaattaccggctgttacaattcaagacaacgcacaagaagccacttggacgacccaggcggattggctagccctcgacaatccaactacgactttctggctaaacgaacaaacattaagcactaatgctaccgaaaatgccccactgacgacttttaaagatgacggtgttgcggcctttagagcccaaaaaatcagtacaaccgcttggcaagatgccttaatcgcagatcaatcaagtttcactggcaaccggttgcgtttcttaggcttcccgcttaccgaaccgctcattattgatggccgaattcagtttagaacaagggtcgctgtcaatgccgaacgtgggctattgagcgtgctggttattgactatggtcaattcaaccgtttaggcaccacacctgctgtattagctgctaaaggccaacaactcggctatcagtggcgctatgatgatttaaaggaatttaagctcaatcgaccaagcaattatcaagtcatcactaaaggacacatcaatctccaaaatcgccacaatagttatcaaaccgacgccgtcaccccaaacgaattctatgatatcacactcgacctacaacccacccattatgatttaacagcgggacatcaactcggtctattagtctacgcgactgatatgggaatgacgattcgtgaagagcaagcattcgtttaccaagtcgacttggctgctagccaactgattgtcccccatctaaatgattaataaggagtctttttataatgtcaaatctcatcacctgtcgtcaaaccctctccatcagtaaccatcgcgtcttcgtcaatgatttgaacgaacatgaaacggtctatggcggacgcttgcttgaactcttggatggttcggcgtccatttcagctagccgcttagcgcgcgtcgaaaccgtcaccgccagcatcgaccaactgaacttcattgaaccattcaaaatgcaagattccttgtgcatcgaaagttacgttgccggtgtcggcacccgttccattgaaatctttactaagattatcggtgaacatctcaagaccggcgaacgattcctcgggctaactgccttcttaacctttgtcacaatggaaaaaggtccggcccttcctaacattcaacccgaatcaccggaagaacggttcatctgtgccggttatgaggaacgaaaagcccaccgtctcgcaaattttcaaagtcaaaaacatttcaatcaaaatatcagtaccgattatccatggaacggtcaataacgaacaaaagaggtgtcgattatcatcatcggctgaagtgaacccccgatattggaccaaaatccaatatcgggggtttttatattgaccaaatattctaaaacattaaaaataaaagttgttcaggattatctaacgtcatccttaggttatgaattaatagcgagaaaatatggtattaagagtaactcactagttgtctcgtgggttcaacgttataaggcctttggcccaaaaggactagatgtcctatcacccgaaaaaacatttgatggctcatttaagatgaatgttttaaaatggatgaaaacgaataaggcttcttatccgaaaaccgcacttcattttaatatctcaaacgtcgggaccatctggcaatggcaacatatttgggagactgagggtgctgatgccttatatcgttccaaaggacggcaaacaattatgtcagctgataaacaatcaaaaaaacggcaacaaacagagttagaacgtcttagagaagaaaatgaattgctacaaatcgagaatgaatacctaaaaaaattaagagccttagtccaggaagaagaaaacaacaagcgcaagtcatccaagagctaaggcttaaacacaaactagtaaaaattctaaaaatagttggtatggccaaaagtacgtatgaatacattattagtcatgaaccgaacggttcatctgaccaatctgttaaacaaaccatccaaataatcaagaagaatcatccagcgtacggttatcgtcgtgtaactggtgaattacatcgtatgaatatcttagtaaatcataaaaaagtacttgtcttaatgcgagaactgcaattactatcaactgcgtttaacaaacgtactcgtaaatataattcatatagaggcaatgttggtaccgttgctaagaacttgatcaaccgtcgtttcttcactgatcgtccttatcaaaaactagtaacagacgttactgaagttcgctggggaaccaagacaattgatgaacgcgcctatttcacatgtatttatgatttattctcaggtgaaattctcagccatcaagttagtaaacaccctactgttgaatttactacaactgttttgaatcgagcagttaagaaaatccctaagaatttaaaataccggacaacagtccactcagatcaaggatttcaataccagcatcaagattggactcatatcttgaaagaacatcgcatttttcaaagtatgtctcgcaaagcaacatgtttagataatgcagcaatggagagctttttccatattatgaaagccgaagctttctaccaaaaagaaaccgatacttatgaaacgctagtttcacaaatatcggtttggattgatgattataatttttcaagaattaaaacaaaattgggttgtaaaagtccgattgaatatcgaatttttacaacccagaaagctgcttaaagtttcgtccaatatttggggttcacttcaggcacctctttttatttatcttaaaagttaaacgtccggctccattcatgtgtgccacgatattggaatggttggcttttaaaacccgccatcccaaaactaacggtcattaaaataattcccacaagaatcatacataaactaatcttcaaccaatttttcaacatctacgccaccacctttaatcgactacggaacatcccaactagccagcgtgtgattccaaccgagaaacgaattaagtatttcgtcatgtaccaggtcgcccctgcacaaatcagccccacaccaaccatcacaaaactaattccaagctgcatcaccgcaattatccagccttcttgtaagccaacaaagaacgataaaactaagctgacactcccaccaagaatgccggcagcagcaaagattgcccccagaaacgggcctaaccaaatcaagaaataaccaagtgccactaatatgatggcggtcaataacaacgtgccccataacggtgaccctaaaactaacaagatactgattaaaataatcaacatcggtgccatcttcttttggcgaaccggtttatctggtgtagctaattgcgctacaatctgagctggcgttgctaaactcgcgataatctccgcttccgtttcacccgcttccagtcgatcatcgattaattcatcgtaataatcaatcgtgttggctgcatcactaatcccataccgcgttaattctgccgcaagctgtttaataaattgattcttagtcattgttacactcccttatgtaagtataaatgcccatcactgccggccaatcggccaaaaaactatcaatcgatgcttgtcccgccaatgttaaatggaaatatttacgcaagcgtccattatgttcgacccgataactttcaatttcaccctgcgcctcgagccgtttcaagattgggtataatgttgagtccgaaatttcaacgacactcgatgtatctttgataatttggtagccatatgaatcctctttcttaagcgttgctaacacacaaaattccaagaggcctttctttaattgtggattcaaaccgatcaccctttcgaaagttaatactatattatgcatagtattgtgtcaagcataaaaaaagaacgcccatcagttttacctgatgaccgttcttttgaaacgtttgataacagtcatatcccgactgttatcaaacccttaatctctgccgccgccaaaaatttggagcattgtgaggaataagttaacaaagtctaagtacaaggttaatgcgcctataacagctaaaccagaaaccgaaatttcaccagttgcgccgtattgacggtacatcatacttaacttttgattgtcccatgctgttaaaatgataaaaataattaacatagcgtatgacaagaagtagctaattgcagctgatgccatgaagaagttaaccaatgagacaataatcacaccgattaaccccatcattgcaaacttgccaaagccgcttaagttattctttgtcatgcgaccataaatcgacatggcaatgaacactaaagcacttgatgcgaaagctgccccaatttcaccaatgttatacaccagtaaaacggccgtaaacgtcaatccgttcaacgccgcatatgccacaaacatggctaacgaggccgttggattcttcattgaacgccgactaatctgaacgactaaaattaattctgcaatcatcaagccccaaaccatccacgagctaccacttgataggattgtgtaagtttgtgctttaaacacagtcaccattaaaacagcaatcagtgctgaaattccgacaccgacagccatcaaaccatacactttactgaaaaagcgggcttcgctgtcgacattcacaacgcgtctttcttccatgaatattcacctcttatatttctaaacgggcccataatcacccgattaggaatattgtaacaaatccatccagaaagacaatcaaaatgcctaaatcttaattatctttaggacttaaattactcaataattcttcgtaagcatattcgtatttttgcacatcaccagcgcccatgaagacaacgactggttggtcgaagtctaagagcggtgacatattgtctaatttcaagacgcggccacctttagtgattttcgcacctaagtcagcacttgaaaccttccctgctttttcacgcactgaactaaagatatccgttaagaagacttcatccgcaaggtttaagctagcggcaaaatcatccattaacgcaattgtccgtgtgaacgtatggggttggaaaaccgctacaatttgtttgtctggatatttttgccgtgctgcatccaatgtggctttaatttctgatggatggtgcgcataatcatcaatgattgtcacgtcagcaactttcttttctgtaaagcggcgtttaacacccttgaagtctgccaattcgcgtgccacttctttgccatcaattttttctaaatgactgacagcaattacggctaaactgtttaagacattgtgttcaccgtaaagtgggacgtggtaatggccgatgttttcgccatgatagtaagcatcgaattctgaaccttgcaccgtccgttggatgttgcgggcttggaagtcatcgtcttcgcgtgtcccataataataaacgggcacattagctttgattttccgtaattcaggatcatcaccccaagcaaaaatccctttttgaactttgtaagcttctgattggaacgcgtcaaacacatcatctaagcctgtgtaataatcagggtgatcaaagtcgatattcgtcatgattaaataatctggtgaataagctaggaaatgacggcgatattcatccgcttcaaatgcgaagaattgcgcatctttaatccctttacctgtcccgtcaccgactaagtaactcgtcttagccacaccacttaaaacgtgagctaataagccactcgtacttgttttaccatgcgcaccggccacgccgatacttgtatagcctttcaataattcacctaagaattggtgataacgaacgactggcaagcccatttcaagggccgttttaatttcaatttggtcatcttggaaagcattcccggcaatcaccgttaagccttcgtgtaaattagtttctgagaatggcagaattttgattcctgctcgttctaaatcgcgttgtgtaaacgtatattgatcgatatctgagccttgtacttgatagcctaggtcgtttaaaacaagtgcaagagcactcattcctgaacctttaatcccaacaaaatggtaaactgtgtcatttgttatcatcttttaaacgtcctcttttcaataaatcacaattatctatatgattaaactaatcccttatagtttaccataatgcgggtttgagctaaataatgaatgtttatttttctctgttatcaattgattgatctctaaaacgcaaaaaaagcagccacaaaaattaattttgtggctgcacttaaacggattctataggtcacactctagcctaatgctaaataatcttcgacattttggaagtagactttataccatgttaagaaggtaaagatggtccagatcttccgacggccgttaatgcgttgttctttattggcatctaacaaggccaataacttatcttgatcaaagaattctgcaacgaaatcttcgctaaagagtgctttgactttttcataatacttgtcatcttctaaccattgcttaattggcactgggaaacctaacttaggacggttggcccaagctgttggcaaatgtttagcagaagcttgacgataagcgtatttcgtatcatgactattaattaagtatttagttgggacttcaccagcggccttagccaccttaggatccaggaacggcacgcgtaattctaagctgtgcgccattgaaatcttatcagccttttgcaaaatatcgtttaacatgaagtgatgtaagtcgatatattgcatttgtgagactggatcagcatccgcaacgttatcaaaatcagcttgatagtttgcttgaatcgttccatcattttgataagcaggtttcaagaaagtattggcttcatctgccccaaaaatacttggattttcgatatcaaaaatcacagattgacccgtatagaattcacgcgggttcgccaaattcgtgtataaatggacgcgacctgggaaggctggcatcttcttaacggctttggctaaactggcacgcgcacccttaggtaatttcttcaagccagaagtgaaggccttaattgttgaattgtgggaatgcatgccgtagttgacatagccagcgaataattcgtcggccccttcaccagacaaggcaaccgttactttttcacgggcaaagcgtgacaagaaccataatggcacacatgatgggttcccatctggttcgtccaagtaatattggattttgtcaaattcagcaaacgcatcatcggcattcactttggtttcattgaagttcaagcctaattcatcggcaagcgcccgggctgctgtgacttcattataggtttgatcatcaaacccaacactgaagacttcttgcggttgcaaaatacttgtgacataactactgtcgaccccttctgataagaaagctccaactggtacgtcagccacattatgggctttaacggattcttcgactgcagcatcaatcttagccacttcttcttcgaaagataagtttgaaggattaaatgacatatcccaatatttttcgatgtccaattggccatcttgataagtgaaataatggcctgctgggaatctgaaaacacccttgaagaacgtttcttgtaaatcattgtattgattcatcatgaatgattttaaggctgtcttatttagttctggtttaaattctggatggcgcatgaaagttttaatttcactactgaacatgaaagtcccatctgctaaagtcgtgtaataaaggggcttaatgccgaagaaatcacgagcaccaaataattgcttagtttgtaagtcatagatgacaaagacaaacatcccacgcaattttgtaacaacctctttaccccattcttcgtaagcatgcaaaatggtttcagtatctgaatctgttttaaagtcgtgaccaagtgcgatcaattcagtccgcatttcacgataattataaatttcaccattgaaaaagactagcttagtgtggtcttcattataaatgggttgatcaccctttgctaaatcaatgattgataaacgccgaaagcctaatgcgactttatcatcgataaaatcaccatcaccacttggtccacggtgtttaatgacgtccatttgttggttcaatacttcttttttctttggtaaatcaaataatccaccagcaaatccgacaatcccacacatatgtttaacccctcttttgtgttttactgcttaattgactgcaaaatgaaataacaattaaagggtttgtctttaaccaattaattgctatctattatcatactattttaattttaataatcccataacaaaatcgtaagatggattattttagtaaggctgcgactgcatctgctgtcacttcacggccgacttcccaatcatctggtaagaccataatccctttagcaggagcaccagcaacaccgatttcacgggctgcacagatcatgccgtcactttgaacaccgcggagttgaccaggccagataattttaccttctggcatgacagcacccactgttgccacaattactttttgtccttgtgcgatattggcagcaccacaaacgatttgaacggtttgatcaggtgcaatctgtgtttgagtaacgtgcatatggtctgaatcaggatgcacatcacattcttggacataaccaacgacaatgtgtggtgtttcatcagccactaaatcaccggtgaaaccagctgctacaagtgcttcatttaaaacagcaacttgctgttcagttagtgtttgaacaccgttgaattgtaaatcgggcaataactcattcaccgctaagaaattatagccgatggtttgacctgcctgatcactaatccgtacgattgattgtttttcagttgtcacttgcttttcaacatcaggttgggtcattaccactaagatgttgggaaaagccgcttggttcatacttgcaattaacatttaatgactccttcaaggttagttcaatgagtgaataaatccagtaatttcgcgttttgttttccgatctttattgacaaaacggccgatttctttaccgttatcaatcacaacaaagctaggaatcccaaagatttcccattcttcacaaatatcgataaattggtcccgatcgatttcaataaagtcgtattccgggaattcagcttcaatttctggcatggctggtttaataaaccgacaatcactacaccaagttgctgtaaaaaataaaacatgtttcccttcagtaatcagatgagtcagattcgtatctgtcatcgctgctaattctttcattatgcaccccttcaattttactactcgttttaatataagcggtttgtccgtaaatgtccactccttaggaccaaaaattatgctatactatttaaagacaaaaacgactgaggagtttttctttgaaaaaaaatgggcaaacgtttaaatatttattaaccggcatcggttttgcgctggcggcggctgccagtgcgaagcaatatcgggcgcaacaaagaatgattaaattaaaccaaattttagaagatgttaaagccggcttaaaccatgaaggccagattgtgggttcttggattgaagaaagtccccacttattctcacaaaacaaacggacctttccagtctatcaaggtggcatcatctgcgagcgtgaagatggtacaaaccaatttcgattcaaggtagacgcaagaaccggcgtcgtgattgaattctcacaaatttagagtgcacagcgcggtgggcacgttctgaggattagcttagtcagacgagtgaccaatttattggtcgcttgactgacgttgctaaccgcaggaacataccgcgcggagcacgtttcaaccaatattataattaaaaaggtacgctatcctagataaaatctggataacgtacctttttgagttgaaacgtgctttatcacactgtcttctccggttagctacagaaaggaatcgatggtaaagaacccccatcaatccctttcttaggctaatcctcaaaggcaacccgtgcgataaaaacactcttgctgaaacgtgctattgacgctagatttctgcgcctaactacacctgtcaaattagcgattatatcactcattcgccagcctatgttagtgctcaaaatctgaccgagcgtcaagtgcactcttatctaaaacgtgctttcaaagctagcaccctgtgcatagctacgtccggcaaacaaccaattgcattggttattcaccagactaggctattgctcgggtgctgaccagctttgaaagcactctacttgtagtgtgcctctaatctgtaaatcacttggccgcgcttgctgaatttttcttcgtattccgtttggatgttgtcttctgcaagttcactattgtgtaaatcgagtgagatgtcgtcaaaaaccatcccataatcattcaggctcatcaatgagtattcgaatagaccttggttatcagtcttgaaacgtaagtagcccgttggttgcataatttgttggtattccgctaagaatgacttatatgtcaatcggcgcttttcatggcgcgtcttaggccatggatcagagaagtttaagtacacccctgccacttcgttttcagcaaagaaagttgttaaggctgcgccgttacccaataataattggagatttggcaatttcaattcaacttgtttttgtaaaatgacggcaatcgctgattcttggatttcaactgcgataaagttccggtctggatatttttgtgccatctgagtgataaattggcccttacctgaacccacttcgatgtaaatgggttgttctttggcaaaacgtgtttgccacttgccggcgatatcttccggactcactaaaatcatgctggggttggccgcaattaagtccgccgcccaaggtttatttcttaaacgcattatgttctccttgttgatgccaatcaaaaaggttggacacttgcccaacctttggcatttaatttttattaattatttcagaaatcactgcttctaagcgcaatatgtcacggttcatttcagtaaaacgaccacgttgataatggtgcttaatactttggagtaggttcaaactgccgtaccagttgacgcgcatcattaattcaggcgtcacctctaggccgtagttctcaagccactcgtgccattcttgacgtggaacatattgaaataaaatcattccgaaatcgactgcagggtcggctaacattgccgagtcccaatccactaagtagagtcgattaatatccgataacaaccaattcttatggcttaaatcgccatggcacacctctgcagaaggtgcttgtaattgacgtaacgtttgcttcaaataatcagctgtttgttctaaaaatgggtgttgccgtaaatcttgcggtaagtcgtaaaaataggcttgcaacatttcgtttgctgaccagacacgaccgccaactttttgtaacattcgtttcaatagttgggattgatgcacccgtgctaataacttagcgacttgtgggctattcatctcatcacgtttcaaggttcggccgttgagccactcttgtgcggttaagacatccccactcgaaatccgcttcgtccagattaagcgtggtgttatgccttctgccgagagcgccgctaaaaatggtgatgtgttgcgctttaggaaaatcttttctgacgcgcgaacgcctaaaaatgcagcgcccgtatcaccaccggccggacgaacttgccagccagtatccaggtcaaaattcatcagcctcgactcctcttcaataaaataaagcgccaaaatacagcgctcacgttgcttcaactgtctaataactaagggtatcatataataattagccagtagtcgtcaagtaggaaagcatgcgtgtcacagggactatgcccccaaccgtttaggcaaatagaattgaacaaagccaatcacgagcacgaacaatgctaaaacacttaaaccaacttgaatcgtcatccctagtgtcactaataaaatgacactaaagagtaacgcctgaagcaataataaagtccgcattaattggctgaatgcttgaattcgtttggtcgttgatactgggtatagatgagtgaaaataatttgatcatactgattgtaaaacggtaataattgaaaaccaactagataaatcaatagaagtccgagtgccaaactcaaccaccatatgtgactgaagcacagaatgatgccccctaaaacaactaaccggatatataacccgctgaattctgtgccccgcaaaaagccacgcgcatataaatagaggtaagtattggctggtttagctgtaattggctttaataagccatctaaatagcgacgacgcttaacctgactactgagccctggcacatccgtgaagaggttatagaggcggtaaattcgtcccattcgagaatcttctgcaccaactgccgctaaccaatcgaatagctgtgtcttttgaacacgcgccaattgttgtcgctgataataggctagtccaagcgctacaagcactccgactaaatttagccactgatataattgactggcaattattgccaaatcaaggattaacgaaagcccttttgttgcctgggtttcatccgcttggtaccactgacgcaactggattgaaaagcggcggtctttgatgattaccaatgtaatcaagacaacggctatgtgccatgccgggaccgtcttagtaattaacaagagtggcgccactagaagcgtcacaaaagccattgcaattaatggtaaccagctactatataaacgtgctgatttcaaatacgtcacaaggccactttcttttggcaataagaagacactatccgcttcttttaataatgttgctaagcggccaaaactaactgccgcaagtaatactaaactcaatacaggttttagccaccaagcttgtggatccagtcctttgacggcgttagcatatgtgtagcccaacgctcctaataaaaagataatcgcaatcacgaaatgatcattgaaaacgaggcgcaaatacttcacttgttcttgaatatgtttttgcacgcgtttttgccataatgcttgcatggttaaccttctttcgtcatctgcagataaatatcgtcgagatcggcgtcagccatgttaaattcaatctttaattcttcaagcgtgccagtcgttcgtacgcgaccctgatttaaaagcacaaatgaatcagcatattgttgcgccgttgcgagaatatgggtcgacattagaattgcagctccttgtgcttttttttcagcaatgatttctaataaatcatgaattgccaatggatccaatccagtaaaaggttcatcgatgataaacaagtcagcattcgtcataaatgcattgacgatcattactttttgccgcatcccttttgaaaagtgaaccgggaaccagtctaacttattgtctaatcggaatcgttttaacaatgcattggctttaacccacgtctcttcaacgtttaaatcataagccatcattgttaattctaaatgctcctttaaagtcaattcagggtataagacaggcgtttctggtacataggctactttttggcggtattggtcaggattcgactgtaacgtcacaccgtctaaagtaattgtgcctttttgtggtgtcaataatccaatgatgtgtttaatagttgttgatttgccggccccatttaaaccgattaaaccaaccacttgattgtttggcacagtaaagctgacctcttttaaaacggggacgtgcgcgtagccccccgttaattggttaatctctaaactcataatcaatagcctcgttttttggtttttaaaactacttttttagtgaatcctttttcatatcatatcttaacacgaagtaaactgcgagtgtatgcccccactcaatatttttccatccgcttacaaagctgatggcagtagcgaaaagcccttgtttatgatagcattaagctgtattgagacttcaaataagagaaagtaggcataattaatggatgattgtatcttttgcaaaatcgttcgaaatgaaattccgaacacagtggtctatgaagacgacgatgtcaaagccttcttggacatcacacaagtgacacccggccataccttgttggtacccaaaaaacacgtggcggacatctttgaatacgatgctgatttagctgcggccgttttcagtcgcattccaaagattgctaaggctattaaagctagcaatccagccatccaaggaatgaacatctgcaataataacggtgcggtggcttatcaatccgtttttcattctcatattcatcttattccacgttacacagcggatgattcatttgcaatgcaattcggtgataatagcgctgattacactgctgaccaactacaagcgatcgcagatggtattcacgcacaattggaggactaatcatgtcattttcaaaaggattactagttggtggcttattagggacggcttatgcccttctcaccgcttctacaaccggccccaaacgacaacaagcgattgcccgctatttaaacgagctctcagaaagttcaactgatgttcaacaaagtgctgttcaattgcaaacagcttcgcaaaatttatcaaacgaactcaaaacaactgcagttacatcacttggtggtatcagtgatgcattgcaaacattttcatttgaagcagcaccacgaattgctcaaatcgaagaatcagttgatcgtttgacacaaaacttaaaaaaataaattcaccaaaaattagattgtatgcaagcgataaggttaagcatatcaacgattcccgcgtttttagcgtaaaacctaaatttgaaagttctgtgaagttttagacgcttcgttcaatttagttagtttatgtgttatattaattggtgaattcactacgaatttattcataaatactttgataaggatgtgtcatacaatgaagaaatggctattagccgctgccagtttattaatggtagtttcactagcaggttgtggtagcaagactatcgcaagcctaaagggtggtaaaatcactcaagacgaatactataaagaaatcaaggaaacatctgccggcaagcaacaattgcaacaaatgatcttgcaaaaagcgcttgaaaaccaatacggctcaaaagccatcgataaaaaagttaagaaaacttatgatggttacaaaaaacaatacggttcatcattcaactctgtgcttgcacaaagcagtatgacacctacatcatttaagaacagcatcaaaacacaatacttaacacaagcagcactaaaagataacaaaaaagtaaccaatgctgacttgaagaaacaatggaaatcatacgaaccaaaagtccaagttcaacatatcttagttgaaaagaaagaaacagctcaagaagtcattgatgcacttgcaaaagacaactcaacaaagaacttcaacgaattagctaagaaatattcaactgatactggtacgaagaaagatggcggtaaattacctgtcttcgatagtactgatacatcacttgactcaacattcaagactgctgctttcaaattaaagacaaacgaatatacaacaacccctgttaagacaacttatggttaccacgttatccggatgatcaagaaccctggtaaaggtaagatggctgatcacaagaaagaattaacagacatcgtttacgcttcatggcttaaagaccaaacagtgatgaacaaagtcatcactaaggtacttaagaacgctaacgtatctatcaaggacaaagatttatcagacatcctttcaagctacggcgttaacagcaaagcttcaaaatcatcatctaaataagcattaacaaaaagaaccccgctgctgtcgcagcggggttctttttgtacatttattctgttggttgatctaaattaggatcttcgactgggcgatagaaacgccgcccatccattgcgaagagccgttcagtaaactgacctgcttccgcatgttgtaatgactgggtcatcatcgtgatacttgcatctaattcatcaatttgatgcagaacttctgcttcaagaacttgtggccggacaggtgaaccatattccattaaaccatgatgggccaagataacatgccgcaatagcaacatatcctcagcattcacgtcgatctttaatgtatcacaagcccgcactatctcttcatcaaccagtacaatatgaccgatcaaattgccacgaaccgtgtattccgttgaaataggaccggacaattctagcgttttacctaaatcatgcaagataacaccagcatatagcaatgcctcatcaatttgtggatattgggcagcaatcgtcttagctaagcgcaacattgaaagtgtatgataggccaagccgccactaaacgcgtggtggttggtcttagccgctggaaaactgaagaattccgcttgatgtttttgcattaaatgtcgaaccaaacgttgccaatttgggtttgtaatttcgaataacatcgcgccaaattcgtcttgcatctcggttacttgcaccggtgctttaggaataaactggtcaactgtttgcggttcgtcccccgtcgttaagcgcagtttataaatcttaacttgcggattattttggtataattcccgcttaccttgtaaatggatcacctgacccgccgtaaatttagcaacgtcttcatcagaagcatcccagtatttaccgccgatttgtcccgattgatcttggaacgtaaacgcgatgaattgcttgccgtttttagcaatccgcacgtctgccgttttaattagtacaaataaatccagattctcgtcgttttggtaatcaaataatttctttgctgtcatgtgtcagccccacttcctctagatttaaccaatgatccgcttcaaagtgtgcttgcgtccgcggattggccgttaaataaatcacttggttggccgcactgagtcgttggagtaatgtccaaacggcgatttggcgttgatcatcaaagttgacgaatccatcatccaccaataaaggtaatgagactacgtcagctacctcttctgcaaacgcaaagcgtagcgcaatgtataactgctctgcagtcccctgtgataattcaccgacttcaaaaagcacttgatccgcccgtaaaaccgtcatcagtgggtcatcgaagttaatcttaatataccgattctgggttagaattgcaaaatactgcgttgccttttccaataaacgggggaaccgttcttgtgaagcggccttcagcgtcgcttgaatccaatcaattgctaactgcttagcaagccactcttgggctaaatcagtaatcttagcctgttcttgtaattgtcgctgtcgctgttgttgataactgtcattatcgacaagttgcgcttgcgtcacgcgtagttgcgcaacagcttgttgctgttcttgtaactgacttgtcaaacttgccacttgttctgtaatttgagcggcttgttgcttaagctgttcttgactagcgattgcttgtaaagccgacaagtccgttgccaattcgcgttttaaatcagcttgacgttgttcattagcacggcgctgttgttcattagcaacacaactggctaattctgcggcggttgttaagttagcctttgctaacaatgctgtttgtgcagcgtcttgttctttaatcgtgtctgttaagcgtgtcacttgttgttgataataccggtaactctcgttgctttgtgcaaggtcttgtgtgagttgggtaatccgggctttgaattggctcacctgggacaagttctcttcatgactgccctgtaacgcccccacccaatcacgggcaaaagcaaacgcatcccaatacatatttagtgccgcttcgattgcttgattttcggcttgttgttgtttgagcgccatggtcaattgagtcatccggcttaaagcatgctgcatcgctaaaacttgactgattggcatcgccgtttcgtagccagtttgcgccaataataccgcgctttgttcgtgcatcgtctgcaatattgcttgttgtgcttgtaaggcagctgtcttggtttgcttttcagcctgcaacacatccaacttagcgagcgcttgttgccaagcttgtttttgcactggttggtcatggtcagattgtttattttgccacatcatgtaaccaccatagccaagtgcggctagtccaacgaccgcaatgactttcagagcgcccggcaagaaaagaccaatcatgaatatgactacgccaatcagcatactcaattgactggcacgtccatcagtcgttggcgtttcttgtggttcaacctgactaactgccgcgttttgcgtggctaattgcgcctctaaatcagccagttgcttggtcagcacttgactggtcgtggttgccccattcatttcagcttcggcttgttctagttgtgcgcgttgctcatctgtcaacggatttggtagttgatccgtttgccattgatactgcgctgctaattgggctttttcgctagcgagttgtgcgctttggttttgccgtaatccaagtaattgaatttgtttttgctgttcatttaattgttcaaacaatggcaccaacgtctcttgattagcttgataaaatcgaaattcacctgtttgatccaatgtttcttgaacagttgctacctcggattttgcttctgctaacgcctttgcattgcgttctcgttcgaccactaatgcttggtattgttcgtcaatcgttaagtcaaacggcgttgccttttcaagtttagtttgaagtgcttgccattccgcataacttggccaacgatcaagcaaatgttgcaactgcgcttggcgttgttttaattcagccacttgcttttggtgttccgtcatcgtcgcaacggtactctgcaatagacgtgcgttcgtttcatattcttgataaccacgactagcttcgttaacggattgcactaactctggataattcttcaaagcaacattcaatggccacttacgcccagagggtttgaaaattttctgactgtccttatccagttccttggcaaaatcgagccactcatgactccccaccgcaccaatcgtcaataaatgctgcaaaaaatcagcctgttttagattaaatatctgatttaaatcctgttggttcgtttcaaaaatctgcgtaaacaaagcttcatccgctggtgccaagaggtcagctaagtaatcagcgccaaattcttggccttgatcgatgaccgttacgtcgcccccaaacttaccggaaagccgccgaatcacaatatcgcgatcatgatagctaaccagtaattcaccaccgtattgcgcgccgtttttgggcacatattgttcataccgttgtttagcggtcgcaaagccgaataacacgcctttaataaaggctgtaagggttgtcttccccgcctcgttttgaccataaaggacttgatagtcggtattcaaatcaatcgtctgatcatgccacttaccgaagcccaaaatggtgactgtcttaattcgcatggctaatcccccatcttcttctcttgtagaattgtcgtgactaagtccttgagatccgcttgaaattctggtgtttcaattgcttcccggataaagttttccttcattaacggctttgctttttccagaatattgtccggtgtcaagatagctgcagccgcttggtcccagtaggcttggtcaatctgactaaattgctgttgtgctgcaaaccgcaacttcaacgcgtatggccaatacagtggttcactattttccaattggtcttgtaagactgccaataattcaccattattaatccgttgcaataagtcactcgataatcgctccgcgtgtgttagctctagcgccactaaactagcgtgatcactttgcatcaattgggcactcaaagccgtttgcaattgagttaagctcatgtcaggtgtcacctcaaactgttgacgttgccactcaatgaccgtcgttggtttgaacgttaaatcgaactgaccatctttggtgtccactaaataaaagcctttttcaccaggttcattcttatgccgcccttgtaagttccccgggtaaacaatcgctggtcgttcttggagaatctggcgcttatgaatgtgacctaatgcccaataatcgtaatggcaagcgttcaattcactaatcgtaaatggtgcgtagtgatctgtatcggccgttgctttttgactaccgtgcaacgtcccaatcgtgtaagttgtgctggcacgttgtggaaaatcaaccactcgatcagctgacaaccaccgttgatcataactgaaccctacaatggtcacactctcatgtcctttggtagtcagttcaaacgactctacttgtgctccaaaaacatggacattggcgggcaattcaaaatgcacttgattggcatcccagtaatcatgattcccgtaactcagatagaccggaatgtcgacatctgccaaacgttcaaattgttgttttaaaaatttctgaactggcaaactctgcgcttcttgatcaaatgaatcaccaactaataatacaaaatcgacggcttcatcgatggctgtctgaattaattttttaaacgccgtgaaagttgacgcatggattgtttcccacaatgctgtcggtgcttgttttaatccgacaaacggactgtcgatatgggcgtcagctgcatggataaatttcatcttgaaaaaccccattcttttggccggtcgtaaccagcttagataagcttcattataccattgccacgcggtgtgataaaggcgatcagaacaaacgttctgtttttaggcaataaaaaagcggtgaatcgaaatcaatcgattcaccgtttgaaacgtgcttctggttgcaacaacttccgcttaatttaaaaatcgcgttaatcctagaacctggattaacgcgatttttgtattaatgctcagttgctgaccgcaatcagtcacactcttatttgaaacgtgctttttgaaactgacttttccagttaactacaaaataagactgatgacaaaatacgccatcagtctcatttttaggttaatcctcaaagccaaacccgtttcaaacgcattctatgcttggtagatatctgcgattggttttgagatgatttggtttaattcatccattgtttggcttaattgacgttcttgttccatcaagttcttgattgcgtcgatgtccccaattttttgagcaagttcttggatttctttaatttcgtcgtccgttaattcttgaccttgcatttgtttttgttgaagtgtcatttgttgcgtttggaatttcttaaacattgtgaaggcaatatcgtcttttttcaatgctgcaaaggcattttgtaagcctaaaaattgtggtaattcttgcaagtgcgttgccatttggttggcatcatcataaatattaactgtcattgtactgactcctttttccatgtatttaattgaaaaaacctttcaaattattataccattgattggctgtatctttcgctttatttatcccatctttaaaacccgattcaattgaatcgactaattcgttcgatgtcccactctgttcttttttcgccaacgattgagcatcttcagtatcaaagtccgtctgtgctgtggttggtaagagttgttgcatctcatatttaaagattggtgctaaaccgtcaatgctagtgttcttcataaagtgatcttgatccgtcttgtcataccccatccaagtcgcaacaacaatatccggcgtataaccgactaaccattgatctttggtcccaaagccataactatcaggcacttcagtactaccagacttccctgcgacttgatagccgttgggtttcgcataacgcccagtcccattattataaacgcccaacatcatgctagtcatttctttggctgttttttggctcataatccgtgtcttggatggttcggtattatcaacaatcacggcgccactcgcatcaacaatcttccgaataaaatgtgtttcagacaattcaccgttattcgcaaaagccgtataagcactggccatttggtaaggtgaaaccccaccttgccaaccacctagagccatcgccaagttttggtcactcttgggtactgaaatgccgaatttttcgaccgacttaatgccgcgtttgaggccgatttgatttaataaccaaaccgccggcgcatttgtactgttggctagcgcctgatacattggcatcgatccggtataaacgttatccgggttcgttggtgtatagtggttagtcccatagctttgcttcttatcttcaagtgatgaatcatagtggtagccatcttctaaggctggcgtataaaccgccaatggcttgatggttgatcccggttgacgcttcatctgtgtaatgcggctataaccacggattgtatactcaccacgaccaccaacgacggctgataccccgccggttttcggatcaattgcaactgaactaccttgaactaaggtgtcatccgcagcgttatcagggaacaaccaattttgtttaaaggtggtttccatcttactttgttgggattggtcgagggcagtatagatcttgtatccgttcttaacgaggtcttcttctttcaacccaaagcggttaatggcttcattcacaacctcatcaaagtaatacggataacgatacccatccgactgctcgtaggtattcgtcacgacaagttgctctttcttagcagcgtcggcttgtgcttgcgtcaacttgttattatcgaccatcaagccgagaattaagttccgccgcgcagtcgcattatctaaatggtcagccggattatagaaactagggctccgcaacatcgctgcaatcacggcgccttcactagcatctaattcactcgcattcttaccaaaataccgttttgacgcatcctgaacgccccacaccccgttaccgaagtaggcattattcaaatacatcgctaagatatcctgtttggaatagaccttggtaatctgaacagctaagaataattcctcaaacttccgcgagaacgtctgcttctgactcaacttggcattcttggcgagttgttgggtaatcgtactcccaccaccggtaatctgcccatgatgaatcactaacccaactgctgctcgtgctagccctttaatactgaatccatgattggtataaaaggtccgatcttcagtcgacaaaacagcattttgaatctgcggcgatatcttatcaagatcgacataagtccctttttgcgaatataacgtccccgcgcgttcatccttaatgtcataaagcgccgttggggtttgtaagttggccttaatctcaccgacgttagccgtcttcgctttaaacgtgagccagctgctcatcgcgaaaatgagaattaaaacagcgagaatcagccatctcgtcaattgtagtcgataccagacataacgaatcacgcgccagacgcgtttcataaattgtttaatcgccaaccaaaacggcgaagcttgcttgttcatgcgatccctcttcttacggtcaaaattaatcttgtttaattgtagcatattcgtcaattgacactgatgccaatcgaagacattaacaatcttttaaaatttacttttacaccaattttcgctaaactaatagcttaaaggtggttgaactctaatgataatttaccaaaaaaaagtgactttagcgcccgactttagtccgatgtctgtccgcggcctgctgaatcactggttagtgccgcaaaaaatgcaacatttcttgcggattaatcaagatattttggtcaacggacattatctcgccttcaaccgacacgttgaagctggcgatcaaattacgatgaacttctcagaagtttccgttaaggtccaagactacgaacttgatgaacggcaatctttttccgttttatacgaagatgatgatttactggtcgtcaataaaccggcggggattaaaacccatccgaacggtcctggtgaaaacttcaccctaatgaaccaagtggcggcctatcttgctaaacaagataaaaaggcctacatggtccaccgcatcgatcaagcaaccagtggcgtgctcttgattggtaaaaccccaatcgtcatcggcattttaaaccgacagcttagtcaaaaaacaatgtcgcgccaatacatcgctattgctaacgatccggaacaaacactcttggaacatgcaacgattaacctcccaattggtgtcgatccatacaataagcgcaaacgcacgattgattacatcacaggtttatccgcagtgacccattaccaattactgcatcgaaaaggacctgcagcaaccttggcagtcaacctcgaaacagggcgaacacatcaaattcgcttgcacctggcggctgatggtcatcccattttgggtgatccgttgtactttccaaccgattcaacacagcgcctactactccacgggcaaacgttgcgctacacagagcccttcacggataaacaaagaacagtaacagcccccatcccagacatttttaaccagtatgtagattaaagagtgagttatcagccggatatctcctgaggattaacacagaacatgtttagctcaacaaaataaggcgttgcgacaaaaaattacttttgtcgcaacgtcttatttgtttgcttatctcgctgttgctagatgttgtgcgaaacgttcgtttaattcggctgctagttcctcactagggctaatgataacaatcgtatcgtgacccgccagcgtcccgacaacttctgggtaccccaaatcatcgattaaggctgctaataaattcccgttacttgggagcgtcttaattacgtttaacatttgcacttgtgtaatggacaaagccacttcacgcagtttatcttttaatttctgagtttgggtgcgttcgtcatcgtgaaaaatcgtatagcggagctcaccgttcacatcccgtgccttaacgatttgcatctcccgaatatcacgtgaaatggtcgcttgcgttgcatcaatcccatcttgtttcaacgttgctaataaatcctcttgcgtcgaaataacttgctgattaatgatttgttcgattcgtgcttggcgatctccttttttcacgactgccacccctttttaccttaattggctctattataccagtttttatcaaaattcgatagacagcgctttatataattcaaaaaagcgcatgttcataacttttttacccacaaaaaaagagcgccgattactcgtgtgcccttttaagattaagctttccgtgcttttcgtactttaaatgtggttaaaattgcgaccgcaacagcaacccttgccaaaattgagaggaagaacaaaccaatattattggttgcccctaacaccccaacgattgggccaccatgtggcactgcatcggtgattttgaagaccatcccgactgcactagcaactgctgaaccagcaatgatacttgggaaaacttgttttgggttagctgttgcaaatggaatggcgccttcagtaatcccaatcaagcccattaagatagctggaatcccagctgatttttcttcttctgtataaagatcgcgacgaacaaatgttgcaatccccaatgccaatggtggaacagcaacggcacaagcaacagcacccatgatttgtggatgtccagccgtaatcgatgccaccccgaataagaaggccactttattaactgggccacccatatcaatcgcgaccatcgcaccaatcacaacgccaagaatcacactcgtttctggattttgtgaaagggccgttaacatatcttgtagtgccgtcatcaaccatgaaataggtgcgcctaaaacgagaattaaaacggctgagataatcccaacccctaataacggaatgacaaaaattggcatcactggccgtaaatcttttggtacgggccatgaattaaaccatttaaccaagtaaccagccgcaaaaccaacgataatcgcaccaataaatccagtcccggcttttgtaccaaggatgtctgtattgttggcgaccattgcaccgatcattgcgggtgctaaagctgcacgccccgaaatagcataagcgatataaccagtgagaattggaatcattaaggtaaaaccaatcgtcccaatctgattcatactactccaaatggtatgtggtggaatcaccattcctgctttagtcggatgcccaccaatcgcgattgacaaggcaataaacaacccaccgacaacgacaaacggaatcatatgggaaaccccatttaataattgcttaataattggactttgttcatgactgtcctcttgtttagcttctgttttcggctgattcttgccataaatacctgccgttagtgctttttcaatcagtgtatcagaatctttaatagcttcagcggtcttcgcatatagtactggcttgccattaaaccgttcttccccatcaacggcaacgtcagcggcaataatcacgaaatcggcatcagccacatctgcggcgcttaattcatcctctacccctgaagcgccttgtgtttcaatcttaacttcatatccgcgagcttgcccggctttttgcagtttttcagctgccatataagtatgggcaatcccaactggacattttgtaatcccaacaaactttttcatcttctaaatcctcctagttaaattcgatttcatcgttaactaacgtgtagagtgccattgcatcatgccgattttgcttcaaattatgaataaaagcgtcatccatcaacttgcgcgcaaacttcgacaacacttttaaatgcgtcttattagggtcatcgagcggcataattagggcaatcgcgatttcaactggtgcgtcatctaatgcttcccaatcaacaccagtttcaaacgtgacaattccgacaactggttgagttaatcccgccactttcgcgtgtggaatcgccaccccattcccaaaaccagttgtgctctcagcttcacgcgcattgaatcccgcggttaatgcaacccgatctaacccattcttatcagcaaataattgcgctagtgttgctaatgccgtcggtttatcatccccaacaacgatatctgtaaaaatattttcaacatcaaattctttcatctggtaacactccattctaatttttctgattcaattgtgccaagatggcgagggcagccgtcccatcagatgcttgtgcgacttgctttaaaagacggggggtttcaatcaattggtctaaatcatgataaatcgcccgcatttggccatgaacagtttcgttcaaggccataaagaagacgagctgcactttgtcgttgtgttgccaattaatactttggggtgcaatcagcaacccaatggctggcttggtaattaattgtgaatccgcatgcggcaaagctactcgaccaagtgccgtacttgctaaagcttctcgggccagcgctgcctggacaaccgttggctttgcatacccttgatcaatgagccgctgaccaattaattcaattgcgccttgatccgttaactactcttgcgtgacaattgtcagttcgggttgcaataaagctactaagtgattggtaggcgtcggttgttcagtaatcatctggcgaatgattccaatatcatgccgatttaacaaaggactgacttcaatcaccggcactgacaaacctttaatcgcaatcgtactgatgactagcgattccttaatcggggttgcaagtagttctcccaaggcaataatacgagtaatccgtaattcttgagcaaacgttttggccaaccgttgccctaataattgcgatgtcccaatgccactactacaaaccaccacaacactcaagcgtgcatcttctgaatgtcgttcaaaaaaagcttcaaagtgtaaactaataaaggctaattcgtcctcattcatttgaatctgatactgattttcaagcaccggctttagtaacactgcttgatcaaaggcttgcggaaaattctggcaaatttcatcagtatatgggttattaatactcaatcccattgcaagccggcgaagtgccgaacttaaatgaactgctaacccctgaattaattcctcatcaactgctaattgagcaagctgttgccgtaatagttgtggcagcccgactgattgccgcaactcggtctggatagtttgaacagatgtatccttcgattggaccgttactaaatgacggttgagatattcctgttcaaaatccggaattgtcaattcaaatcgccgttctaaaatctgtactaacagctgtgtttcggcaatgaacggtgtcaccactggttgggctccattgcttccaccagttggtgctggcatcatcagatgaatcgctaacgactgaaactcgtaatcagtaaatgatagcgtacttttttcaattaattccgctaaagctgtgagtatgtttttaatcaaggctggttcaaacagttgattcagattatccggtaattgaacatggcgcactaactgtccatttaactctttagcctcagtccgttttccccaatactgactgattaactccaccgttgcttgccgcttttgatgctcagaaccgattaaggataaaccggtatgcgtgattgccaattgaagaccgaattgcgcgagtttttgctttacctttttcaaatcattctcgactgtactccgactcacgtatagggtattagaaagttgttgaatcgtaatcgatgctgaacctaataataatttagccagaatgcaatgacagcgttcttccttggattggggacgatcattggcctttttttcaagatgattggctaatgtcgcgacatccccggtaaaataaataccgtcattcggttttcgaacgagtttcacattaaagggctctttcgatatcattcaaggtggttgcaatggtgcgctctgaaagctgtaactgtgcggcaatgtcgacatagtacgttttatgctgggccaaactatattgaataatagcgtgttctcgtttgttcatgcttatcgcaactcctcgtttcaatccctctacgctatctatagtctaatgtttatgtatccgcttgcaaacgtaattatttgcaagattattctggtaattattgcgcaatgctccataagcttttcttaatcaaccggttatgctggggattgtttatttagttgctagcctaatccaatccattaccttatccggtcaatttatcgcacaaaaaaagagcatcttaattaaaagatgctcttactagatatgttttgctcgccatattcaatggtaaccccctaagtcaaaagactacaaacataatcctttaacgcgggctgttaaacctcaaaatgtgccgacacgaacatattcaattattttttgatattgtagaatgagttgatacctttgtatgaagctgtatcgcctaattgttcttcaatacgcattaattggttgtacttagctaaacgatcagtacggctcattgaacctgtcttgatttggccagcgtttgtagcaacaactaagtcagcgattgttgtatcttcagtttcacctgaacgatgtgaaacaacagctgtgtagccagcttctttagccatttcgattgcttctaatgattctgttaatgtaccgatttggttaactttaacaagaattgagttagcagcgcccatcttgatacccttacgtaggtaatcagtgtttgttacgaagaagtcatcaccaacaagttgaactttttcgccaagttctttagtgattgatgcccagtcttcccagttgttttcatcgataggatcttcgattgaaatgattgggtatttagcaactaagccttcaaggtatttaacgaattcaggtgttgtgaattcttccccagttgaccaacgtaatttgtatgtcttgtcttcgttgttccataattctgatgaagcaacgtcgatagcgattgaaatatcttcgcctggtttgtaaccagctttttcaatagctttgatcaagtattgtaaaggttcttcgttgtttgcgaagtcaggtgcgaaaccaccttcatcaccaacagaagtaactttaccgtcagctgataaaagactcttcaatgcttggaaagtttctgaacccatacggatagcttcgcgtacagatttagcaccaacaggcataatcatgaattcttggaaatcaactttgttatctgagtgagcaccaccgttgataacgttcatcattggtgttggtaatacgtgagcattagggccgccaagatattcgtacaatggtaagcctaattcgtcagcagcagcacgtgcagcagctaatgaaatacctaagattgcgttagcgcctaatttacctttgttttctgtaccatctaattgaatcatagcagcatcgataccgcgttgatctgtagcgtcgaaaccaatgatttcttttgcaagaggaccattaacgttttcaacagcttttaaaacacctttgccaccaaaacgtgatttgtcgccgtcacgtaattcaacagcttcatgttcaccagttgaagcacctgaaggaacgattgcgcgaccaaagccgccatcttctgtgtaaacttcaacttcgacagtaggattgccacgtgagtctaaaacttcgcgacctaaaatatcagtaataattgacatgtaattttctccttttttggctaatgctaagcattagcgcttttttggatgtcaggcaaagcctacatctattttagctaattttacgccattcgtaaacaggaatgcgttaaaaattagtcgttaaagtgaactaagtctaagaatgaagcaggttccatacttgcgccaccaactaaaccaccgtcgatgtcttctttgcccatgatttctttaacatttgcaggtttaactgaaccaccgtattggatacgaactttgtcagcaactgtttggtcgtataacttagcaactgtttgacgaacaacagcacagatttcttgtgcttggtcagcagaagcagttttaccagtaccgattgcccagattggttcgtaagcaatgaccattgagctaacttggtcagctgaaaggcctttaagaccttctgttacttggtttgaaacccattcttcagctttgccagcttcacgtgtttcaagtgattcgccacaacagaagataggtgtcatgttgtttttgaagattgcgtgtgcttttttattgatatcttcatcagtttcgtggaagtaatcacgacgttctgaatgaccgatgatgacataatcaacacccatttcattcaatgtttttggtgaagtttcgccagtgaatgcaccagcatcttcgaagtaacagttttcagcagcaacttttaagtctgtgcctttagctgcttctaataaagcaggtaagtcaacagcaggtgcaccgataactgattctgtttgatcaaacttaggtaagttggctttgatagcattcacgaactcagttgtttgagttgggttcatgttcattttccagttaccagcaatgattggtttacgcatgagaaaatctccttttaattttaaattatttgtctgaaatagcagcgataccaggtaatgtcttaccttctaggtattcaagtgatgcgccaccaccagtagaaatatgggttaacttgtcgccaacgcctaatttcttaactgcggctgttgaatcgccaccaccgacgattgttgtagcgcctgataagttacctaagaattcgccgattgccaatgtccctttagcaaagttgtccatttcaaacacacccatagggccgttccaaacaacagtcttagcatctttaaggacgttttcgaagtcagcaattgctttaggtccgatatctaatgccatgtagccatcaggaatgttaccttcaacaatttctgtcttagcatcgtttgagaatgcgtctgcaacaacgttatctacaggcaatactaatttgtcgccagctttttcgattaattctttagccaattcgatcttatcttcttcaactaatgagttaccaattgataaacctttagcagcgtagaaagtataagtcataccaccaccgacaatgactttgtcagctttagctaataaatgttcgataacaccgattttgtcagaaacctttgcgccacctaagatagcaacaaatggacgttctggagcgtcaactgcttcgcccaagaatttgatttctttttctaataagtaaccagcaactgcaggtttgttattagctttcatagctgttgcaatcccaacgtttgatgcgtgagcacggtgagctgtaccgaaagcgtcgtttacgaacatgtcgcctaatgatgcccaatattcgcccaacttaggatcgtttttactttcgcgtttgccaaagtcgttgtcgatgtcttggaaacgagtgttttccataaccaatacttgaccatcagtcatcgcattgattgcatcttctaatgctttgccttcgtttgaagcaacgaaagcaacgtctttgtttaataattcgccaagacgtgcagcaactggtttcaatgtcaattctttcttatcttcgtcactcttgatacggcccaagtgagaaagtaagattgccttgccaccattgtcgatgatgtattggattgttggtaaagcagctacgatccggttatcgtcaccgataacgccgcctttgattggtacattaaagtcaacacgtactaagacttttttgcctttaatatcttttaaatctgcaactgtttgttttgccatgtggacaaacctcctagattttcataaaaaaaggcggaaggagtttacctcctcccgccttataaaatgctatcgcattcctaagttcacaaaagtgaaattagattaagctagcaaatttttctaatgtacggatcatttgagcagtaaagcctgattcgttgtcataccaagcaacaactttgacaacttggcctgcgccaccgccaacgatttgtgtttgagtaggatcgaatactgaaccgaattctgtaccaatgatatctgatgaaacgatttgatcatcgttgtaaccaaatgattggttgccttctgtaactttcttaacagcagcgttgatttcgtcagctgtaacttctttgtcaagagttgcaactaattctgtcaatgaaccagtgataactgggacacgttgtgcgtggccgtcaagtttacccttcaagtcaggaacaactaagccaagagctttagcagcaccagttgaatgagggatgatgttagcagcagcagcacgtgcagcacgtacgttaccaccacgatcaggaccatcttgtaatttttgtgtagctgtgtaagcatggattgttgtcattgtaccagctttgataccgaaagcatcgttaactgctttagctaaaggtgctaaacagtttgtagtacatgaagctgctgagatgatgttatcgtcagctgtgattgtgtcatcattaacaccgtaaacaactgtcttaacagcaccagcaggagctgagataagaacttttttagcaccagcatcgatatgagcttgtgatttttcttctgatgtgtagaaaccagtactttcaagaactaagtcaacaccatcattcttaacccaaggaatattacgtgcatctgattcagcataaactggaatgttcttgccatcgataacgatgctgttttctgtagctgatacttcgtggttgaattgaccatgagctgtatcatactttaataagtgtgctaacatgtctggtgatgttaaatcattgatagcaacaacttccaatacatcactgtttgttgcgtaaatacgacgtaaagctaaacgaccaatacgtccgaaaccattaatccctacttttgtagtcataatagaatttcctcctttaggaaatgaaaaattttttattttaaagggttgccccttgtaaaatcgagtttgcggcaccttcatccgtgattaaccacgtctgtttaggtgcaaggtgcatgtacgcttggattgcttgggctttagaagcaccacttgcaaccgccagtacacacggaatattcaataagtcacgaatctgtaatccgattcgcggaatcttgtacacgacttcgccttgtgcattgaagaagtaaccaaaggcttcacccaccgcatgcttttctttaagcatcttgatggtttcaatcggcatctcacgacgttcagccatcgtaatggcttcaccaatactgtgtaaaacaccccggcttcgttcaatcagttttaacacttcttgaacacttggttcttctaacaaaggcgcgtacgtcttctcactcacctgttcaggcacatacaatgcccgatgcttaccacctgtctgcttagccatttcggcacagactgcattggcctgaatatcaacactttcaccaattccccctcgagctggcacaaagattagattgcgctgtttcgatagatcagttgaaagttcatgagctgcttcagccatcgtcgttccgcccatcactgccacaatactttgcccttgtggtaataataattgtaacgtactattgactaatttgcccatttcggtgaggacttttggttgttcatcactattgccagaaacaatcaagcaatgttcaatgcctaagacttgactcaactgacgttcagtctgatgtaaccctaagaattgatccattacttgtcttaactgatcgaggatttcattccccttcacggttaaaaccatacctgatttagacgaattaagcaaaccttgtgctttcagaaaatccgtctcagttctaattactcgctcgctcatcttcagttgttccgcaagcgttcgtcggccaactggcgcgagccaatcgatatgttgtaacacctggtaacgtttcttaatgataccgacgaaatctggcgcaaccgcttctattgcagataattcatcgcgcaattgctatcgcctactttccgtgggacataaaatgtccatctgtgtcattagtcgacccatggttggcaaaaaataaaaggcaacttactaaaactagtaacttatccttttgaacaagaccattataacaagtgcagaaaacagatgcaatgctttggggttgatgaatacgttttctttccgaatattttttaaacgttgatttatcgcgatttatcaaaatttacacttgaaatttccgcttaactccgctaatataatatattgtactgttgagtacgcggaatgcgtcgctagtgtaatggatagcacccaagattccggttcttgagatccgggttcgactcccgggtgacgcatcatttataaaaaatcccgttagaagtaaaatacttctaacgggattttttattgtactaattctgtaactgacgagaatcaactacttctcttgcatttgtatctttttttaattggagttcaacacttgcaccatctggttcatccaatttttcattttcaaaactaacgctaccgttatttacggaatatctaaatttatgctgagaggcatcaagttggatgacaaacacgccatctgctatttggtaactactattaaatgctgtacccatacttgatactcgcacagtcgtgtcatctttaatatagccgtttgtataaccatcgtgaattaaattttgtggcgctcgatttgcttccatcgcttctgtggcatcttcaccattgtactttacaggcgccattagaaatccgtctgctatataatcaacgtcatcatctgccattgttgtagatgacgttgtatcatgattgtcgtttgatgactctgttgatgccatactattactagattcactaatcgatacttgttcttcatcgctactattatgtctaattgcaatcgccggatctgcagatggttcctttgttgattcagttctagctgttgtgcttgaactagtggctgattgttcaaccacacgtttcattggcgttgctttagaaaaataaactgcgcctcctgcaattatgattaggataacaatcgtttgaataaataatgcttttcttctttgcgatctaacctgaataaaatcgtcgcgccattgcggattattccgtcgctctttataaaaagcatatgtatgtttggtccgagttcgcgcgcttaaatattttttggtcattatttccacaagatagctttagtaatttcattcatactattaacttaataactataataaactcttcattaaatacaaagattaatcggtattacacgcttctatatttgttgtacaattatctcattacgagtccaattgaggagcacccattcaatgcagtattttaaaaccctatttacaagtacattcacttttttaaagcagtcccaggcctattttcgtagtgtgttattgatgcatggctttttgcttttaatttgtctaccgcttttgagtaaagccagctacttcattctggtacataatcagatccagtttctcgcgttgagcaacttgccagcgcttattcatcagcatccgattgcgctgttagcactcgtaggaattgcgctactaattttattgctggctttcttcgaattcacgtttcttctattaagtgtgtactttattcagattaaacggccgctagctttgcaggcattgctgaagatgacttttgcgcaactcaggcaccttcgaattggcacgttctttttctttctatattattgtcttttaattttaccgctgggcgggcttggctatcattctgatttattgactaagtttaaaataccggcattcattctgaattatattctcatgaatcggcgaattgtcgcgggacttttcattcttgtctatttgggcttattatatctcggcttacggctgatcttcaccctaccaaacatcattcttcagcagatgactttcaaaaaagcgttgaccagtagttggcagtttacacatcaaaaaattggctcattactggggcgtctactcttaatcggtgccgcactgattggctttacgggactcacttttttcctactcatccaactacaagcgttgattgaaacccacacatcagtgggactgccaagtgccgtggtcatcatgaccttgttgcaagctgctatgctcatcaacttggtgctttcgacagtcgccgtctttttcatcgtcattgattatttgttggccgacccacaatttgtgcaaccgacgttcaactatgcaaccttaaaattaagcgtgccgctcagtggtcgttggttattattcgtagcaaattgcgttttaatcggcgttgggacttataattgggactatctccgttcagtaaccattcagcagccgctaagcatttcccaccgtggcgtttcgcaaaaagacggcgtccaaaattcgattagtgcgctgcgaaaaactacccgattaaagcccgattatgttgaaatggatgtgcaattgactaaagatcaccaattcgtcgtctttcacgacttccaacttgccccactcactgggcactcagggaccccgcagtctaaaacactggcgcaactgactaaaatgaccgtccatgaacatcggcaatccgcaccaattgcttcatttgatgactatcttgcacgcgccaatcagcttcatcaaaaactactgattgaaattaagacacccaccaccgataatcccggcttggtgcaacatttcctgaataagtatcaggccaatatcgaagctcacggtcacatggtgcaatccttaaactggcacatcgtcgaggccgttaaaaaggcagcaccgaagattcaaacgggctacattctcccctttaattttatcggcccaccaatttcgaacgctgatttttatgccgttgaaatgacaactgtcaacagtcacttcattcaagctgcacatcaggaaaataaggccgtctttgtctggacacccaatgatcaacaagccgtccaacgcatgatgtatttcggtgcagacggcgtggtcaccgacaatctcaccgcggttaagcaagctaaacaacaaaataaccaacgacactacgccgataaactcgcatattatgtgatcggtattgggtaatatagtaaaaaaggattgggaatcgatatttttatcgatccccaatccttttttattagcgattctttctaagccaacgtcttacacttgaatagccaagcgtaagccccgttaagagcaatacaccagctgaatacacgaatccaatgacaatcaccgtcttcatcaagcctatttggcgaaccatgtcagcacaaaaagcagccatcaatcttcaattgacagctgcttgcactttatttgtctaaaagtcgttgtgctttttgggcggcgacgttcatgatgttccaaggacggtcaaaacctggttggaagaagaagtcagcatatgctaaatcatcgattgtcatcttaccttgaatggcaagtgaaatggcgttgatgtttgccgtcacgtcagctttagacatgatttgcgcaccgagtacacgccgtgtttctggatcaaaggttaatttgaaatcgaccactggattttctgcttcagggacgaagtgtgggcgatatgtttcagaaaccaaaacagattgggtcttcacacccattttatcagccgttccttctttaatcccagttgaagcaaagtgataatcgaagacgctcaatgctgatgaacctgaaacagcgggtaccggttggttggcggtgactaagttcttagcagcatagcgaccttggcgacgcgcattcgttgctaaagcaattggcatttctttgccagttggtgcgtatttcacaaccgttgcatccccgactgcaaaaatatcgggttggcttgtttgtaagaattcattgatttcaatccggccgctgcggtcgagttgtaatgtatcttttaaccagcctgtgttaggccgaatcccagcagcttcgatgactaagtcagcatcgtattcagcttgatcggtcacaactttagttagcttaccgtcaacgccgacatattctttgacgccttgaccaactgcaggatagatattgtgcgcttgcatttcagccgttaattgatctgtaaattcttgatcgagatagagacttaatagacgtggcaagacatcaacaactgtaacatgtttgccagctttagcaaatgcttcagccgcttcaatgccaatataaccagaaccgatcaccacaacatttttaacggttggatcaactgtcttcgcctttaatttaatcgcccaatcacggccacgcattgcgtagacattctctaaatcacggcctggcactggtaattcaaatggcacagcgccgacactcaagactaacttatcgtaactttcttcacgcgttgtattattctttaaatccttcacttggaccgtatgttgatcggcgttaatcgcggtgattgcttgttgtaggttgacttcaaccccttttgcccgcatgccttctggtgtcgcataactgacatcatcaacgtttttgacggtcccttctaaatagagttgcatcccacaggataagaacgataggaaatcgccttgttcgtaccattggatggttgcatccggataatcgagtaaactttcttgaactgtttcaaatccaccatgagatgaaccgacaacgataattttcacattgatcactccttgttctattttacacaactcaagtataacgcatatgatattaattacaaataaaaacgcattctcggctgactttcaactgaccattcttaaattccatgctagaatagtgacaagctttacaataaaaaaacaatggagattgctatggcctttatcaaacgaaacttccccacttttatctatctagcaacactttatctcacctatcagattctaaatactttgattcgcatctttaccagtaccgatattctcgtctacgccaaagaatcattaactattctcatcgttttcttcggtattttctatttctcatatatattgttcggcgttggcttattatacgctggccacgtcatttcgaaacaatcgggcaactacgaaatttcactcatgattttaaacatcctcaccacttttagtacccttaccacgattattttaaaattttctgaggcgcagatgccgcgtttcttactttcaaccacttttttcatcattttgaccaccatctcattagccacaacttccaaactgctacaactgcgcaccaagcgaattgacaataagtgactgccaaaggtgaagtagcgtctttttatgttaaggagacatttttcatgaacggtaaaattgattactaccaactctttcaaacaatgtatcggcaatatgggccgcaacactggtggccttctgattcccattgggaaacaatggttggcgcggttctagttcaaaatacaaactggcaaaatgttgaccgctcgctcgccaatctacgatcaagtacgcacttcgagccaaacaatctgctttctctttcggatgaagcccttatgttggctattaaacccagcggcttcaataacgctaaaagcaggacaattaaagggctgtttcgatttttagcgacagttgattttgacttagacacgctcaatcagatgacaaccaccactgacctacggcgccagttacttgccatcaaaggcattggtccggaaacagccgatgtcattttattatatgtcttcgaccgcccagtctttatcgctgatttatatgcccgccgcttaattgctcacctagagcactgttctttaaaagacctccactatttaaaggtacaacaggttattgaaccacagctcttaccccaaatgactgttaaagactgccaagaatttcacgccctaattgacgatcatggtccagcctttcttgcagcacaaaaataagccgacatccgtttttagacggatgccggctttttaattatccaacaacccctttgcttgtatcagctgggtggaagagttggtcaataatacccgaaacgcgggttaaatcaacattcccgcctgaaactaaagccacaatatttttatctgttaaccattgaggatcaattttaccactcagcagtgctgccgttggtaatgcaccagcgccttctgtgacaatcttagtccgttgcatgagatccttcatcgcagttgcgatttctttttcggaaactaaaatcatttcatcgactagattttgaaccactgggaaagtcagttcacctggaatcgcaacgtctgtcccatcggctagcgtgaagtccgcatgatggctggtgattgtgcctgcttcaaatgaagccgtcatcccgtgcacgttttccgattgaaccccaatgatgtgaattgaggggttaaaggatttcaaagccgtcgcaatgccggagattaagccaccaccgccaaccggtacaatcaccgtatcaacattccaaatcgcatccaaaatctcaaggccgattgtcccttggccggccatgacttcgcgatcgtcgtaggggtggacaattgttaagcccttttcggctgctaactgctccatgtacaaccgcgaatcattaaaagtcgtaccatgtaaaacaacgttcgccccataaccggcggtcgcttgttgcttagcaagcggtgcttcttctggcatcacaacggtcgcatcaatccctaataacttcgcggtcaatgcaaccccttgcgcatgattgccggctgaagctgtaatgatgcctttagcccgttgctctggcgttaaatggttaattttattgttcgcaccacggaatttaaacgatcccgtcagctgcatattttccaatttcaaatagacatgaccgtgcgccacattacgactcaagaacatcgattgaattaaaggtgtttcgcgaatatacggtttaatggttgcccgtgcttcctcaatatcccggatatcgcaaatgtctgcagtttttaatactaattgattcgttgccattctggccacctcttccatttgaattgacacaaatgtctgcggataggttgtgctatccttcacaattaaatgtaagccacttatcaagcattgtcaaaacaaaacggccttaaattagaacgctttcatttggtggttattaagttctcattctagttgtttaaccagcaagatagcactagagtagccatgaaataaaatgatgaggtgttcaacatgaccaaatcagtcgttaactttttagctgtcattataatcgttcatttaaatcattttatctacaatgtgctattaaaaatagattaacgagcatatggagcactattgaacatctaatatccttcgtccaaaaataggtactgcccaatatccatccaaatgaacaataaataagccaattatagtcaattttcagctgatgcgcacacccaaaagcaagccctgatacaataattttcatcaccgtatcgcattcgtttttttaataaaaaagagattccccgatttaaaattgaagtgcaacacttgataactagaccaattagactagcttaaaaggccatgaaggcctattcttattattaacgacaaaatcaacagataaggataggtgtcttcatgacccaaactaagaatatcatgcctaagcattaccaacaactccaatcttttgaacgcggtcaaattgagtccctgactcgattaggatttggcgttcgtcagattgccagccggcttcaccggagtcccagcaccatttctcgcgaattaaaacgcgggttaaccacccagattgattcccagaaacatcggtcatatcagggctactttgccgagcgcggggcggcttactatcgagaacagcgggccaagtgtcaccccaaaggtttactgcagcgggctgccgtgttcttcaagtccctgccgaaagctttaaaagctaagccacgagttttcagtgtcgacacgtatgtccactatttcaaagctcattacccgggctttccctgcccatcaacggctacggtctatcggtatatcgaggctggcaagctcccggagcttcacaactatgatttacccatgaagctacgtcgccgcgttaaacgcccgaatcaccgacatgcccgcctgaataaaaaacggcttggacagtccattgaagaccggcccgcagtggttcggaaacgtcaggagttgggccattgggaaggcgacttagtgaaagccaaacgggttgagtccgaaccagctttaatgacgttaaccgagcgagttagccggatggaaattatcgttaaattgcctgattaccgggcagagacttgccggcaagccctccaagatacgattgatgattacggtgcagaaaactttcggactatcacgtttgacaacggctcggaattcgctagtttaaatcaggttcaaggaacggaaatctactttgcccatccatattctccctgggaacggggcactaatgagaatgtgaatggtcaattaagagagttcttcccaaaggggtattcctttaaaaacctctcattagtggatctgcagttggttcaagacacgctgaatcaccgtccccgccgctgtttaagctatagttgtccagcggatgttatgccacaactggtttaactttctagaccaattataagaataggccattagtgttgcacttaacttgacaattgaggtaaaaaagagattaaagaaaataccagaaataataattcttctagtgttggtgcaaacaaatcattgctgagtgtcgtcaaaatcggaacagccttcattagctcattaatatagacttgattctccggcagcgctaatgggttccaacgtttatcgatccaatcaatcactagcacgataccaaacatcactaaaataagtacaactttctttagcatcggctctctttacacattttgccagtcaggttttggttgtctcatataaattctagtaaacaaaaagactattattagccacaccccaaaattaacagtaatcaatgctggttcatgcgtcgtcatataatttgtactcaacccgaaaagggcttccatatggacgaacatcactaatatcaataaaactataaaaaagctaatccgatggcataacgttccgatcttcaacaatttctttctggatcccctactaaactaataaccatatctaatcatcgataatgccgtcatttcttttaacttagcttgttgactggctgatagatccaagccttctttttgaatcacattcgcaattgcgatgttcattcggctcaaaattaatggtactgctgtcgtttgtgcttcaatttcagtttgataactacgcaaaactgattgtaatggtgccgtttggtcatcttgtttcaagtcgtttaataatgccttaatcattgtaattgctcgatgcccacgttcctgtccacctacataccatttcatattcaatcgtcccttactcttaatcaactgttgagacaatcataacgcttatctacattattgacaaataactaaaaggaactataattagtgtgaattattgttatttggaggggtataaatgataagtcaatcaattgcaaaagaaaacatccatacactttacaacagtctaatggcgcatccggataaatcaaatgcattgttagatattaccgatgttttactacaggtctacctcaaaattgatacggttaagaatcccgaggcactcgtcaatcgcctggccaattacatctatagtgttggctttggcaagattcatctcaccaaggatgaagaacacctattgattgatttaggcgcgtttggccaacgtgctggttggaacggcgtttatcgcggtgattatactgccaaagccgattttttcagctataccgatgaacataaatatgctagaaattaaaagagtgtgacggaagtctgggatttcccgagcacgcttagacaattagatttgaccatcagaaaagggattgagacaaacacaacgtttgtctcaatcccttttttaggcaagaatattgccaatcccatgtaatcctgcgcggttaataatcgtaaattcagtcggttgtaaatcagtttgttcagtgacgattggattcaactggtcaatcgtaaacggcgaagtaaacggaaagccgtcaccgtactgattaaaataagtcacagtattccccagcacgcttttcaattgctcagaattgattgcccgcgtcactgtcatcaaatacgcacgattattatcgcccgtcaaagtggtgctcgtaaaaaatttaaaatagtctttcgtactcatcactgatccccccaatctttaatcaacgttactataacgctttcaaaaaagcaattacagtatctttcgtcaattccattataatccaccatcattgcaattcatcaccgttacgccagttaacttagatacccataccacatcacttggtgactatcatcagctcaatcagaagaattacgtcccagccttacaaactgaatcgggcgatttcatgactgaatgcgccgttattttagaatacattagccaccaaagtccgctgccactaatggccgactatgccactgaacaatactggcaacaacggatgtggttgaattacatcaccaccgaattgcataagaacttcatctcaccatttcgtaaaggtaattggctccctaatacacccgaaagccaagatttagtccattcacgggttttcccacggattgcttatgttgaaaaagcgttagcggaccagtccttcttagttgctaatcaattcagtgctcctgatgcttatctattcgtcatgaccaattggtatcgacgactcgcattttcattgactgacttccctaatctggaccgttttgatcaacacatgcgacaagacccagccgtgcaatccgtcctcaaacaagaaggcaaaccacattcatcgaaagcttaaccaccaaaaaaggaatcagcagtcgctgattccttttttttttgatgatttacatcacattaatcgtgacgtcaatattgccacgagttgcctttgagtatgggcaaatttcgtctgcttttttgagatacttcattgtttcttcttctgataaaccttcgatgtgaccgaaaagatcaacaccaatataataattggcagggccatcactataaagggaaacagtcgccttaatcgtgggttcgcctttaatatgttcttggttaaggacaacatctaaggcactgttaaagcaagaactatagccggctgcaaagagttgctctggatttgtactcttccctgatgggtctgtccctggtgacttgattacatatttctttgcttgatcgggtgaataaacgaagccattgcggcccccttcattaatcatcgttgtttcatattgttttgccatttaaggtccctctttcttttattgaatacccttactttagcacagcaaaattcagaaccataatgatttgtttatacaaaaaaggcgccagccaaaaaatagattttggactggcgcctttcttgttaatcctcaggctataactggctgattattcacacgctatttaatataagccgtcttgtagctccattgtgcgccagctgtgttatgcacaacgcctttgacctttggattcttcaagtatgccgtatcattttgatagagtggtgtaatcccttggactttattcatgacttgcgcagctgtcacgaggtccgcccaacgtttgtcaggatcgttcgcatcggcattcattgcgcggtcaagggcagctttgtattctggattgtcgaagccaccggtattacttgcagcccctggtaacatgatttctaaaaacgaaattgggtctttgaaatctgccccccaacctgcgagtaataaatcatagtcgccttttttatcacgactcgctgaaacttggcttggcacggtctttaatgtcaacttgaagcctggtaagactttttcaagttgacctttgagatattgaccaacatatgacgcgttggcatcatcggaattaagcgttaaggtgagggcaactttcttttgaccagtcgatttcaatgcttcatgccaatgtttaagcgctaatttttgattgtaatccacggtatctggcacggcttgtgatttagcaaagtccaccttcttaggggagtcggctaagcccactggcacgaaaccagtaatatcgtttttcttcgaaccgaatagccggttattcaacgtcttacgattaatcgctaacgaaatcgccaatctaaagtcttggttattcaaaagtgcttttttctgttcatctgctgatttgaagttatatttaatgtagttcgtcaacgcataaggatatctatggaatgctttatcatcccgataattatcaatttgttgattatctaactgggttaaatccagtttcttttcctgataaagataaagcgcggtgctggtattttctaacacggtatagttgacttggtctaattttacctttttgcgatcccaatattgattgttcttcacaaattgccacttctcactcgtcccattccagttaactaacttaaacggaccagagtacaccatgtatttcgcattcgtcgcatacttcttaccatatttttcaaccactttttgatcctgtggggcaaataatggataagccatcaaggttttcatgtaggccacaggtgtggataatgtgacttccaacgtgtgctcatccactgcccgtatgccgagttggtctggtgccatctcaccttttgcaatcgctggggcattttggatattactgaaaaggtttgtataaggtgatttggtttctggtttcaatgtccgttgccatgaatagacaaaatcttgcgcccgaatcgggtcaccattactgaacttggcatcacgcagtttaaatgtccacgtcttaccatcagctgaaactgaactcgatttcgctaagcctggttcaattttaccgttctcaccaagccggaataaactttcataaatgttccctgtttgaccatatcccgttgaagtcgaaatatcaatggtatctagtggtgcttgcgcgccaagctgaagaacctgtttggcttgcacccccgaaacttggcataataagaacaccccgaatataaaaattgcactaacactaagttttaagaactgccgccctctttgcatgacacgcctccttacatttaataagtagagtataccaaatcatcagtcaaaagttaaataataagcctaaaaaaagaggcctttgtaaaattaacttttacaaaggcctacaatattaattagacggaattctcgactgacggcacattctaaacgtgcttttcaaaccatgttcctgcgtttagcctaattagccaaataagcggcttcaccgctttttcgtctaattttgctaatcctcagaacataaacggtttgaacgcactcttattcgaaacgtgctttcaaaagcatactgctgtgcttagctacacaagtcaaatgattgctttcagcaatcattcgccttgttaggctaatgctcgcagtatacccgcttttgacgcactctttagttcattatttcaaacaattgttttctgaattctggaccatacatgactgctccgactgggatggcgaagtctagtgcttcgttaattttagtcgtccaggttggtccgaagcccccacagagttcaataaattgaatgccttctgccttcaattgcttagcgacttcaataattgaaccatcttctttagcacgtggatcgaacccgacggtaatcatctcgcacgttcccattggattacggttaatcaccgtattttgttcaggtgaaaagtctggtgaaaaatagaaaaacgcccatttatgcaaatttgctaatgccattgtttcgtcctccttgtttgctttcatcatagagaacaatcatgatagaggcaattttactgcctcttacagccagccattatgccgtgcaatctgaattgcttcaacgcggttgcttgcatccaatttgcttaaaatcgtcgacatgtaattgcgaaccgttccatccgataaaaataatgattcggcggcttgtttcgtactcaacccattagcaatcgcacgcaatacttccgtttcccgctcagacagtggattcttcgtttgcgttgtcagcccaacaactaattctggcgcataaacaactttgcccttcatgaccgaatgaatcgccacaatcaagtcatcactcgggccatcttttaatagataccctgccacttcggtgctgatagcctgcttgaaataactcggttgggcaaaagtcgtcagaataatcaccttaatctgtggctgacgcgtatgtagttggcgcgcaatctcaagccctgtcatgcccggcatctcaatatctaacaaaacaacatctggttggagggtttcaatctgatcaagtgcgacttgtccattgacggcggttccgaccatcgtcaaatcatcctctaaatccagaatgcccgctaaagcggtattcaatagttgctggtcttctgccaaataaagtttaatcatgcccttccctccatcaatcgtttctaaccgttcgcgcatgcccacaatcccatgactcttatattgatcttcgcttttcaatccgcgaccattatcttcaatctgcatctgaaaagtcgttgcggttcgattaaaaaccacgtaacactccgttgcctgactgtagcgaattatattggtcacggcttcatgtaaacattgcgcaagcacttgttgattttgttgtggaatcccttcaagttggtcttcatttttagtcagcagtaaaatgcctgcaacgctgagattccgttcttgattgatcaattcctcagcaacggtcacttggcgtaaaccagcaacaatctcacgcaccatttttaaattctgacgggaggcttgttcaatctcgagtagttgttcgggtaccgcggccggttttttcgccaataatttacgtgcatattccgcttttagcgtaatcattgaaaatgactgacctaaattatcgtgtaaatcccgtgcaatttgttgccgttcgttctgcttaatcatatcggttaatcgctgattggtctgcgttaattggcgatttttccgattaaaacgctgaatcgagctagccgcaaatggtgaaaagatgcagaacaagccgtacaccattaagccaatcagatcatcgcgtcccatatgaccaccataataccaatatagggtgaccgctggtatgattagtgacaacagataagcgtagtaatagcgccagaaacttcggcggcgcatgggaatcgaaccaaacacccaggcagtataaatattcagataaaacgcctggataatgactgctaaaatcgcactggtcaccatttgtaagataatccagaatgtgcgataccgcgatgcgacatacccattgcgataagccaccaagaaaatcagaatcaagcccataatcgcttgctgcttaaccgtttgatacggaaacgcataaccaattggaaagagcaagaaaatcaaccaaacatatggaaataagccatattggggtggcatggcaatgtagcgtttaaaaaaattcatgcatgcatcgctcctcttttatgatggtttaagtatacgacaattaccagtaataacccagcccagagcaacgtgatgccatattcacccaagtgtgcgggttgatgcgcaatcagcgcttggccaatatgattaatcggataaaccggcaaatgcttgccaatcacgcgagctgttttgggcattatttctgttggccaccataatccccctaaaattgctaaggggaaagctaacaaattagacaccagttgaatctgattttcatcttttaaaaatgaaatgctaatcccaattaaacaaaggaggatgctggcaaaccacaaccagcccgccgttaataaccaactggaccacactaaatgaatttgattactaatcccagcaactatgaaaatgacgccgatcgttaaagcattgattaagcctaagttcaacaacttagccccataataagtccgatgactggttggtgataaatcaattaaggaaaccaagccatcccgtgcgtcattataaagtaatgtcgataaagtaaacgtgttgctgagaactaaactataggtcgccatactgaccatgtattgtcgattgaatgctgcattcatcacaccctgtttcattactttcgtaaacaagagataaaacgcaatcggcattaagagtgaaaaaataacaaagcgtggattacgccaatatgcgcgtttaaagtctatttttgtttgtaccatcattgtttgcattttttagtcctccatcatttcgctataaatttcatttaatgagcttgcttgaacctgcacatcatgaacctggatccccatcattggtgctaattgacttaagatcggatcgctcttggtaacttgcaacagcaccttggccccagtcttcgtcacgcggatcacgcctggccattttgcaaaagtagctgctggtaaatcagtcgtaaaacgaatctgcgttcctttaaattgttgttgtaatgttgccaagtcaccatcgaattggaactggccatctttcaataataaaatccgggttgcaatgtgttcaatttcctctaaataatgcgacgtgacaataatcgtcttgccggcttcttttaactgttcaatttgctgccagaatttttgtcggctgccaacatccattccaacggtcggttcatccaaaaatagcaaatccggattgcctgccatggctaaagcaaaggagaggcggcgtaattgaccacctgaaagttgggacaccatcttatgagcctgtgccttcaaatcagctagcgttaataattcagcgactgaccgtggctgttgataataactgcaaaccaattctaattcttcgatgacactgacccgagccagtcggacatttccttgcatcatcgcacccaataagttgaaatgttctttctccgttggcttctgacctaaaatccgaatctcgccagccgttggttggagtcggcctaaaattaaattaatcaatgttgacttgccggcgccgtttgcacccactaagccaacaatctcaccaggttgaacacttaagtctacctgatttaaaacaacttgttgttcgaattgcattgtcacttgtttaatttcaatcattgtcatcacctcatttaataaccctagtatagaagtgattccgttttgtcgttagacgattttgtcatgacttacggatgacaaatgtcatgtctttggtgttaaaataaagctgattcgttttaactcggaggttttaattatgacaacaagccaaccagcagcaccatcattttttacgaaccggtctacccaagccatcgcgcaagatttattaggaactcacttgctttataccagccaccaaggcacacttggcggcctcattgtggaagcagaagcctatgtcggcaccgatgacactgccgcgcatgcttacaatgggcgccgcacaccctttagcgagccgctctatcatgagcctggtacaatttatatctatcaattacgcggtttctttctatttgatatcgtgacccaagcagtggatcaaccacaaggcatcttgattcgcgccatcgaaccgacccatggcattgaacaaatgcgcctcaatcgcccgaaacctggcgtcgaactgactaacggccccggtaaattaatgggcgccctcggcattcacgataaacaactgacttttcaaaatgtggcggacgcccctttaatgattgatttagcgcatcgtcgccaccccaaatcaattgtcaccgcgctacgaatcggggtcaattataaagcagcgagtggtcaacttccttatcgctattatgtcgctggtaacccgtatgtgagtggtctgcctaagcgccagtgggacttagaacaacatggttggcaattttagcgccaatgtcaatttttaattgaaaacgatttcaccaacgctataataatcttgtgaattaaataattaagttagaaggtcattgcatgaaaattaaagcagctgttgttgaacaacaaggcgcaccatttgtcattaaagataacatcgaactcgcaccactccacccagacgacgttcaagtccacatggtggctagtgggatttgtcactcagacgaagcgcttcgtaaaggcgacgccattattggctatccaatcgtcctcggccacgaaggttccggaattattgaaaaagtcggttcaaacgttcaaagtttaaaagttggcgaccatgtcgttctctcattctacgcatgtggcatctgtgaaaactgtctcaaaggcgttccaacacaatgcctcaactacgcagaaaataacttatccggcgtgcgccctgatggtagttcccactttactgaaaatgaccatcacgttgccgatatgttcgatcaatcttcattcacaaccacaaccgttgtccgcgaacgaaatgcggttaaagtccctgacgatttagacttacgcaaactcggaccactcggttgtggatacgtgaccggtagtggcactgttttaaatactttaaaaccaaaacctggcgacacaatcgccgtcttcgggactggtgctgttggactcgcagccatgatggccggtaaaatttcgggttgtacgaaagtgatcgctgtcgatatcatcgacgaccggctcgcactcgctaaagaactcggtgcaaccgatacgattaacagtcgtcaaacagacgacgttgtcgcagcaatccaagccctcacaaatgggcgcggcgtgaacttctgtgtcgataccacggggattacaccagtcatggaagattcaattaaggcgctttgccaaggtggggtgtcagcaacaattgccgtaaccccaaaccacatcgatcttgatacttggaacgacttatgtgtcaacgacaaatccgtcgtcggcgtcaacatgggtgactccattccgcaaatcgacgtccctcgtttaatcgaattctaccgtcaaggcatgttcccctttgataaaaccgaaaaattttatcaattcgaagacatcaacactgccaacgaagcctctattaaaggtgaaacaatcaaacccgttttgattattgacccggactatcaattctaagcaatcaaaaagaccgcttattcagcggtcttttttaatttttctgacgccaataatggccaagtgttatcaacatcatcaagacgattattcctctgagtaaccaaagacccaatagcgcgccaaacacaatggtaactgcagacactaatggcttttggaaaataaacgcaaaccctaatataataatcaatactggcatgcagtccagctccttttctttttgaaaattgcatgttaaatttaaagcaatcatatgaagtgaggtgttagtagtgccagctattcccgataatctacttgccgcgaccatggggcgtaaactcgctacggttcgtcgtgcgcaaggcttgtcccaacatcaattagcccaggatatttgttcgcaaccgatgattagtcatattgaaaacggcacttatattccaaacgccattttgttagcaaaactctgcgaacggcttaatatgccgttagaacaagcgctgttaagtcattatcccgaaattgatcaacaacccgaattcaatcaacaaattaaacaactgtgcaatgcacacgattatcgcggtatgttagattatttggatgcgactggcttggccgaacaccttgaactggcgaccgatttacagacctactactactatcatggcatcgcagtattccaagaacttcatacaaccacggatagtttacgggaactacaaatggcactcgactatacgtttacaccgcgccaacaagttttaacgcctactgagattttgattctcagtagtatcagctttattaagagtacaccccatactaatcaaactgacttcgaacacgtcctcgcaattgtgaatgcagggcggttcacgcactatgacgagaacattaatatcttattctacctgtatagtctggcactctatcaagatcaccactttcaaaaagcttttgccatcgccaatcaaggaattgactggctcagcaatcatgattcacactacatgttagccgacttattcttgctagtcgcctgtacaataaaaaaagagctacgacaaaaaattgacttttgtcgtagctcttttttgaaattctatatggctcattctactgcgctaataattgtccaattcttgatttaaattcagttaagaaacgcggcgtatcaacttgtacacaaaccgccgtccgcgttgctggatcatctaggcgggcattatccccaattgttcgtccacgtgacgggccttctatctcagtcttcaagttcaatgggaaagtcgtgactaagctaggatcgattgcaacagcgactgctaagggatcatgtaaggcacagccgtgcaaatggggagaagtgacttcataggctttgatatagtaatcaaccatatcggcataagctttggctgctggtgtaccgagtgcgcgccattctgccgtatcggtgcgtgtaaaaagtgtgcgcaacgtgacatcaaggcccaccatcgttaccggcaaaccactcttaaagagtaagtccgccgcttcagggtcttgactgatattagcttcagcaaatggagacacattaccacaaactgttaaggcgccacccataatcacgatttgaccaactttcttcaaagttggtaaatctttttgaatcgctaacgctaaattcgtcatcgggccagttgccacgatgctcaagtcagccccatacgcctgacaagcacgtaatataaaatcaacggctgattcagttgccatttccggatggggctctgtcagatgaatctcaccaacgccgtcttgaccatgaatttccgcactaattggtaagacgctaaaatcatgcgtcgtcgtcgaatgcccagcccctaaataaactggaatgtctggatgacctaataaatgtaaaatttgttgactattcacaacgcttcgttcagtcaaaacgttgccgtattctgaggtaatcccgattaaatcgacttctgatgatcccaatgcataagcaattgctaacgcatcatcaatcccagtatctaaatccaaaatcattttttgtgccacgccaagccctcctcaataatcatgcaaaataatgtacaccacaagtgtaccccattatcggggacgggtaaattaataacctaaggattaaactcaaaaaagacaagtagattattctactcgcccttttcgatgattcagtttagaccattgatttcatgatgcattaaaatcgtttgaccatctgactgagtcttcttttggagccgatctaataacaacttagcagctgccaatccaatcgcttctgttggcggttgaatcgataggattggccactgtccaaattgatgttcatcggcataatcatagtgaccaaatagtaaatcttggccaatccgaataccattttctgataaataagtgagcgcaccaaaggccatattatcattgctgacaaataaagctgtaataccttcggctaataatgcttgggcaccgcggtacccgctagtccgagaatagtcaccttcaaaaacatgtaactgtctgtctggataagctgccatcgtctgtttagcacctgccagtcgttcacgggcaacataatcatcctgattagcggcaatcatcccaatattctggtgtccgaaatcaacaatttgttgcatcacttgtgccacacttacgcggtcatctaataaaatcgaattaacattgcgtagctgatttgggttattaatcgtcacaaccggaatatcaagtgccgctagtcgttccattccttgccattcttcacctgctaagaaaacaattaaaccatcaatcgaatgcgccattaaataatcaattttttgatcaattaacgctggttggtcactaaagccacttaataataaactatacccttgttgctcaacgcgttgttctattccagaaacaacttccgcgccaaatcgacttgaaatactattcatcaataaaccaattgaaaaactttgattgttcttcaatcctttagcgataatattttgtttgtaatcgagttgctcaatggccgctgcaatcttggcttgattagctgctttaagctgttgcccattcagataccgtgaaacagttccgactgagactccggccaattcagcgacttctctaacagatgacattcttattccccgcttatatcgataaagtgattttctccgctaaatcagcaaccataatagtcactgcttgtgcacgtttcacctgattatcaatatccatgtaattaagatcagcagcaggtagttcgaaagtaatgctcttttcttcacctggttggaaggcattcttttggaaagcttttaacagcttcgttcgttgaataactgctccaccagttaatttgacaaataataaactactttcttggcctacaaactgtccgttattttttactttaacagttacaactagtttgtcaaccatttgcttaaccgctaattgtcgataatcaaattggtcgtaactaagtccgtaaccaaatggatataacggttggccaacctcatcatagtaatcatcttgtttagcagcatcgcgttgatagtagtaaaccggtagttgctgggtattgcgcgggtaagacacactcaacttaccacttggattattaagtcccactaaagtttcagcaattgcgcggccaccttgttgaccaggaaaccaagcaatcaatacagcatctgcaagttcatttaccagtgttaaatcgtatggccggccttgcaccatgacacatgcaattggcttgcctagtgctttcaattgcttgagcagcacttcttgttggccccccagactaagtgatgcgacatcaacattttcaccagaatccatgttgatgccttttgaactcactgccccgttacttaggaaggccatatcaaaattacgtgcactggaaccacctaatacagggatgattaaatcggcatcgcgcgcaagctcaactactttggcaattgcctcttcttgatgaattgaattacgcacctcacagcctaatgcatacacgacttccgactcgggaaacatttcttgaatcgcttgataaattgtttgcgcttgacgcgctgaactttgtgctgctgtataatcccccaagagattatataattcatcagcattggggccaatcactgcaatcttttgcggcttattccggattggtaaaagcccattgttcttaacaagcgtcatgctttcacgtgccacttgcagattcagcgcatcagctttttcaagtaaggccgtcaattgcgcattcggggcttgtacatagggttgttcaaacagacccaacaggaatttcaacgctagtactcggccagcagcattatctaaggcagcttcgtctactaggccattttcaatggcttgatcaagcgttaggaatgtctgatcccataaacttagatcgacacctgcatttaaggctgccgccgcagcttctggttgtgtttcaaagattcctgataaccgatcaagcgcaacaccatctgccatcacaatcccttgaaacccatttacatcccgtaaatcttgagtcaacaacggctgattgatatgacacggtaccccatccacatcgttataagcagccatcacacctgccgcattcttgacactactcaaaaggggttcatagacgtctgaaaattcacgttggccaattgtgacggtgcctgaattatggccacccaatgcttcaccttgcgcaatacagtgtttcaatacaacaccaatggcatcagtcgttcgcggtttagcaggttggtctaagaaagcaacatcactttgaattaaatccccttgaaaacccgccacaacggcttcactcattcgcgccgctaaaatgggatcttcaccaaaacattcttctgaacggccccaacgtggatctttgaccaaatcaagcgtcgaaacaagcgctaggttaacgcctttaagcactagttcttgtgccatcaaatgcgatgattgctgcattaaccgcgtattaaacatattgccgcggccaatattagttggatacgagattccttcaagcccttgatggccatgaggacattcttcaacaattaatgctggaatcccccagcgtgaatgcgccatgacatattcttgaacttcattagcaactcgctaactatcctgtgcacgaacgccattttcaaagttcacttttgaccatggatctgcgcgaaataaaccataaagtgcaccgacaccgccgccccattcaacatgcgccttgaatttttctgtaaacgttaatgactgagaatcttcgaaagtttcccatccataaagatgttgattcacttgaccaattttttcctgcgtactcatgcgtgaaagtaaatcagtgacccgctcacgaatggtcagcgctgcgtcttgatatggatactgcatttcaaaaacctcattcctcagttaatattttgttacttgcaatgacaaatggtaagaataaaaagacatctaaaccaattaataagatggttaaaatcgctgctcggtaatcaccgccagttgccaagaaagattgaataacaggcggtgtaatccatggtgcagccgctaccgttttactaatcaaacctaagcttgttgcaaaataagcaatcactaaattgattgatggaataatggcacatggaatcatgaagattgggttcataacaactggtaacccgaacataacaggttctgtaatattgaagaaacaagttgttaaccctaatttagcaacttgccgttgatctttccgccgtgaagcccataagatggcaatcactaacggtaagatacaaccgcccccaccaatcaagccgaacgcatttgtaaaaggttctgtaataatatttggaatcgcatgtcctgctgaaaaggccgccatattttcttgaatggcttgtagcaatggtgcttggcgaactggtgctaaaatgctagaaccaagcatcccaaagacccataagaaatctgagaagaattgtaagaataacgtacctggtacagataatacaaacgattttagtggcgtttgaatcgcaaggtcaattaattgagggacgttcaacccggttgtcacatttaaaataaatacaaaaatagcaaaaatcaaaataaccgagacttctgggaccaatgaattaaacgaggttgcaactgctggtggcacgccttctggcatcttgattcgtattttttcaaactttgtaaaacgaatgaataactccgtactaatcaatgctgctaacatcgctgttgcaagtcctgatgacgaggttaaactttgcaagaaaacacctgttgcttccgccgttttcccatttgctaaagtgacggtactcgtcacaggcatcaaaataaacattgttaccaaacttaaaataccagcatgaactgcactaaatgcaggatcgttcacttttccagagcgaacataatgcgttgctaaattagcaccgatgttataacagaccacaattgataaaatactcatcgtcccattattcacaattgttgctaggtcagctaatccgcttaaatcaacaatcttttgaacagcggcgtttgagaaaattagcgcatttaataaaaccataagcgaggccgccataacaagtggcattgtcacaatgaagctatcccgaattgcaattagatgccgctgattattggtttagaaataaacggcaacatcttttctgacagtttatctacgaatttcacagtcatttctccctttattgaatataattgaaccggttcaatttcatataatagcacgcgattatcattttgacaatagcgcttacaaatatagcctaaaaaagattgagtccccctcatgaacaactcaatctttaaaccattgacaaaggccacctattcctaggtggccttctaattaatttcgcatattaaattcttacataatgtcaggtagccagtcactaattggctacgcacactagcatcgaatggctagtggagatgacgtgtgattcacgtcgcttttatttttgggttaattcaattatgtctaaattcttgtgtttctaaatatcttctcgtttaaacagcgtaagccgcctctttacactacttgtaactccatggttactccagttgattaaagtcttcaaataatacttgatactacagtgataagtgctgattaactttcctaagtataccatattttcagttcgaacacaaaatgaccataatctttctgaaaagaggctttctatttgaccaaaattgacctttgctgtaaaattcaatttatagactacagagtgattctactctggcttatataaggaggcaattcaatgttagtaccgacagttatcgaacaaacatctcgtggcgaacgtgcttacgatatttactctcgtttactaaaagaccggattatcatgttatctggtgaagtgaacgaccaaatggctaacacaatcattgcgcaattattattcttggacgcgcaagattcagataaggacatctcaatctacattaactcacctggtggttctgtgaccgcagggttagccatcatggatacgatgaacttcatcaagtctgatgtccaaacaatcgcaatggggatggctgcttctatggccagtgttttactttcagctgggacaaagggcaaacgttttgcattgcctaactcaactgtcttgattcaccaacctttaggtggtgcacaaggccaacaaactgaaattgaaatcgcagcgcgcgaaattttgaagactcggaaacgtttaaaccaaattttggcagacaactcaggccaaaccttcgaaaaattacaagctgacactgatcgtgataactacatgacagcgcaagaagcaaaagattacggtttgattgacgatattatggtcaaccaaccaaaatagagtagataataaaccggttctcttctgaggattagtaaaaaaaagggctagatcaagttgatctagccctttttttataccaaatttgttatactggcagtatcttaaaggagggtcttccatggatattagtgtgattaaaagcgagaatgtgacaaccaccggcggtattacaattggtcagccagatgcaccattaacatcaattgaatttatcaacgtcgcttgtccctattgccgcaagtggtttttaaaatccgaagaaacgatgactgaagcagtcaaagctggtcggctaaaacgtattatcaaaccttttgataaggataaagaggatctacaactggggaatttagcccatacctatttaccttttgatcaacccgaaatagtgctgcaaacactatcattcttgtttacgcatcaaaaaacatggcgtaatgatctgacaccagatgaatttaaaaaatacatcgatcaaaatctcaaattaacgccacaagataatgcagaaaatttaaccgcaattattgctgaagccaatcgtgccaatattaaattcgtcccgaccatcattcttggtgaccatatctttgatgaatcaattgacatgactgacttaagtcaactactaaaataaaaaacaggtgtcccccctcggggcacctgtttttgtatgtacgataaagggttccaaaaaattcaatgtaccatcaaatcttttggaaccctttatccgtcattttatgaaaaacgtgcattatccatttgaatcgcattcaaatgatgttcaacttcattcatttcttgacgtaattcatgatacttatcgcttgagaaatcgagatagtttgtgcaagcaccaacccgttcgtagatttcttctttttgactttctgctttttcagttaaggtaacgtcaactcggcgttcatcgtctgatgcacgattccggcttacccaaccatcagcttctaaccgtttcaaaagcggtgttagtgtcccactatcaagttctaaatggtgccctaattctttcactgacatcttgccatgttcccacaatgcaagcattgcgatgaattgtggatatgttaatccgtaaggttttaataccttaccgtagaagtgattgtaagccttttgtgcgcggtaaatcgaaaaacagagttgttcatctaataatactggtttaaccatataattttcctccataaaatgtccttcagttattgtacttaattatattgtacaagtcaaatattgtgcactacctatttattttgtcccttatccattcccctgttggtgggcttcggcaagttgattcaattttctgagccggtgattaatccccgacttcgaaattgccccactcggcattttttccccaagttccttcaacgtaatatctggaaattccaaacggagtagcgcaatctcacgcaacttcgccggtaaattatctaatccaacggtgtcgcgcaagtattcgatattttcaatttgttttgtagcagcatcaattgtcttattcatatttgcggtttcacaattgactaagcgattaaccgaattacgcatatcccgcacaatccgaatgtcttcaaacttcaacatcgcgttggtagcaccaatcacttgtagaaaatcagcaattttttcagcctctttcagataagtgatgtacccactccgtcggaaagtcgttttggcatttaagccaaaacgattcatcatgcgcgcaatatcttgattatgctcttcgtacaatgaatagatttccaaatggtaccggcttgtttcaggattattcactgagccaccagctagaaaagcgccccgcaaataagaacggacgcgctgatcttcattaatgacatcttctgacacctttgtatgaatggtaaaaccgtcctcctcaacaatatcaaggtcttttaaaacggtattggtatcatactttaagcgcacgatgtattgattattcttttttaacttcattttgcgacgtactagtaattcggattcaacttgataattttgtttcaataaactataaatccggcgagcaatcgccggattctcagtttgaacgtttaaaacaaattggtgattcatcaagctcagtgacccattcatccgaattaaagcggctaattccgctcgtgcatgttcaggatgcacttcaagttgcgtcagttctttcttcacttcacttgcatatgaggccacgattattcacctcgcttagctgtattgacctggaaagcaagattcataatttcactcgctactttttgtccattatggaacacaccatgatctttcaacttcaaaaagttatcggaaatcactcgacaacccaatcctcgtaagccatcaaagtcatgttcaaccggccagagaatttcgtcgtacttttgatgatccaaatagttttcagggacttgtgcggtattaaccaaaaccgtgtccacgaagttctgaccaagatgatcattcaacacgcggacgtgatcggcatcggtaaagtgttccgtttcccctttttgcgtcatgatattacaaatgtaaatcacttccgccttagtttgcttgactgccgcacctaagtttttaatcattagattcggtaaaatactggtaaacaaactgccgggtcctaagacaaccacatcggcagccaaaatcgcatcaaccacttgttgaacggcttcgggtgctacagtatcatcttgatccgtttttgagacccaaacacgcttaatctgcttgcgtgctgcagtaatctcagattcccctgttaactgggtgccgtctttaaattcagcattcaacgacagcgcaacattggccgcaggataaatatgaccgtcaaccgccatcatttctgataaccgttgaacagcatcaaaaatacctgattccatttcagataacgccgcaataattaaattaccaatcgcatgccctgagaaaaaggcatcgtgtgatttaaagcggtactggaaaatatcgagcgttaactgtggtaaatctgacaaggcgactaatacattccgaatatcaccaggtggtaccacgttaatgtaatcgcgaataacgccggatgaaccgccatcgtcggcaaccgtgacaattgccgtagcatccgcattctgttcacggagactctttaagataacgggtagtccagtgccgccaccaatcacaacgacttttggtcgtcgccctttaatgacccggataatccgattagtagctgtcatgaccggttaaccgtttccttgcgtttcttcatatcccggtgggtcacgtcaaccggataatcgaacgataaatcatcagccaatcgttgggcaagcgctactgaacggtgttgcccgccggtacagccaatcgcaattgtcacacttgttttgccttccttgagataacctggcatgatgtcttttaacagcccactaaattgttcgtagaacttttcagtcgctggctgcgccattacatagtctctaaccggttggtctaaaccgtttaattccttaaatgctggcacatagtatgggttcggtaagaaacggacatccatgacgatatccgcatcaattggtaaaccgtatttaaacccaaatgacatcacttcaatatggaatgacggattatctgacgtcttgaagacatgaaaaatcttttctcttaattgtcgtggtgacatggttgaagtatccaccaccatctgtgctcgattgcgaatttcagttaacaggcgccgttctttttgaataccgtccattaaacgcccctccatcgctagtgggtgggaacggcgtgtttccttgtatcgcgaaaccaattcctcatctgatgcatccaagaagagaatcttagtcgtcacgaattgggtattatcaaggttagcaagcatttcaatgatctcatcgtaaaaagcacgtgagcgcaaatcaatcactaatgcaatcttagtcactttgccggactccttaaccaattcccaaaacttaggtagcaatgtcggtggcatattgtcgacacaaaaataacctagatcttcaaaactttgcatggcaacggttttcccggcaccactcatccctgtaatcactactaagttcaatgtatctgtcatcagaccaccccttaagttttcgcttttatcattgtaacattcctggtgtgtcattgaaagctgtcgaaactctcgacacgtgttatttaatgctattaaaccgagttcattcctaatgtctaggcatttgaaagagcttattttttccataaaaaaaattgcagaacaatcaaattgttccgcaatcattaaatttagagactataaacgtcttgcaaatgcgatgatgatggcattaatcccaaagaaagcaaagtaaaaaccaactagggtcaccatcgttacggcagtcaccactggatccattaacaataagatcccaacgattacgcctaagatattcagaatcatcgaaacgatgtataggcctgtgctaaattgcttgagatggccgacattcaataatgccacaattgaatcgaacaagaaccagaatgcaaagatataacctaaagcagccactccagctggaatattcaagataaacaaaattcccaaaatgacatcgacaatggcatcgaccaacattaacgttgcgcgcatccctgtctcttgacgtaaccgattatatgcactgattttggcaattccccgaataatcgccgcaatcgcaatcacgattaccaaaccagataatgtcttacctggttgattaaacaagcaatatgcaacgattaagaaaataatccccgtcataaattctgaccaatcaaagtgccattcattttttctaaacattcccaatcacctctcgttgttaatacctttatgatactttttttacggacaatctacaactaaatttgacaaaacaaaaagtgggcggttaagacagcaatcattctgtcttaaccgcccgctttttaaacacattctatcaaccatcttctggttaatcctgagcggcaattgtgtgtgctgtatcgcgttctaaaacaggttttaaatattggcctgtatagctttcactgacgttggcaatttcttctggcgtaccggtcgcgacaattgtcccgcctttatcgccgccttctggtcctaagtcaatgatgtgatcggcagtcttaataacatctaagttatgttcaatcactaagatcgtgttaccttcttcaactaaccgttccaaaacgcccaacaagcgcttgatatcgtcggtatgcaagccagtcgttggttcatcgaggatgtataaattcttacccgttgattgtttctgtaattcagaggccaacttcatccgttgggcttctccacccgataaggttgtggcagactggcccaatgtgacgtagcctaagccgacatccacaatcgtttgtaacttgcgggcaatcttgggaatgtttgcgaagaagactgcggcttcaccgaccgtcatgtctaagatttcggcaatgttcttgcccttatagacgacttccaaggtttctgaattatagcgactgccatgacagacttcacacggcacatacacgtctggtaagaaattcatttcaatcttgataatgccgtcacccttgcaggcttcacagcggccacctttaacgttaaaactaaaacggccttttttataaccgcgtagtttggcttcattggtttgcgcaaacaaatcacgaatattgtcaaagacgccggtgtacgttgctggattactccgcggtgtccgaccaattggactttgatcaatattaatcagtttttcaagattctgataacctgtaattgttttatattgacctggttttgctgagttacggttcatcttttgtgccaaagcttttttcaaaatcgtattgactaaggttgacttgcctgaacctgaaacaccagtaaccgcgacaaattcacctaatgggaaatcaaccgtcagattcttcaagttattttcagccgcaccggtcacgcgaatcttcttgccattgccttgacgccgttctagcggtactggaatatattcggaaccggctaaataacggcccgtcaatgatttcggattatgttcgacttcagttggggtcccagcggccatcacttcaccaccgagttcaccagcgccgggcccgatatcgatcaggtaatcagccgcgcgcattgtatcttcatcatgttcaacaacaattaatgtattgcctaagtcgcgcatcttcttcagtgacccgatcaaacggtcattatcacgttgatgcaaaccaattgacggttcatcgaggatgtagagcacgccagataagttcgaaccaatttgcgtggctaaacgaatccgttgggcttccccaccagaaagggtcccggctgaccgactgagcgttaaataatccagaccgacgttaatcaagaaagttaaccgatcatgcacttctttcaagattggtttggcaaccacactgtctttttcagaaagttcaagttgatcgaagaatggtaaagcttctttgatggcgttgtctgaaacggcagcgatatcttggccgcccactttaacagccaaagcttgtcgatttaaacgagcaccatgacaggtttgacacgttaattcagtcatatacgtccgcatttgcgtccgtgtgaaatcactattggtttcacgataacggcggtcaatattggctaatacaccttcaaacggcacgtccacatcacgcacaccaccgaaatcattttcataatggaagtggaagttcttaccctgagaaccatttaagataatgtctttttggcgtggtgttaatttgctaaatggtcgatccatgttaattttaaatgacttgcaagcttgttcgagcatctgtggataatattgagagctaattggattccaaggcgcaatggctccttcgcgcaatgtcttgctggtatcaggaatcactaaatccatatcgacttctagcttaacccctaaaccatcacagtctgggcaggccccaaacggtgcgttgaacgagaacaagcggggttctaacgcgcccaccgtaaagccacagattgggcaggcatagtgttctgagaaaagtagttgttcgccaccgatgatatcggcagtcgcatacccttctgataagcgcagagccgcttcgaacgagtcaaataaacgggaccggacaccgtctttgacgacgattcgatccaccacgatattaatgtcgtgttttttattcttatccaattcgatatcggcactaacgtccatgacttcactatcgacttgaacacggacatagccttctcgttggattttttcaaatacttttttatgttgcccttttttgccacgaataatcggtgacatcacctggagtttcgtcttctcaggtaacgctaagacacgatcaaccatttgttcaacggattgactactaatttcagtcccatcgttcggacagattggatgaccgacccgcgcccataaaagccggagataatcattaatttccgtgactgtcccgactgtcgaacgcggatttttagacgttgttttttggtcgatcgaaatcgcaggactgagcccatcaattgaatcaacatctggtttatccatctggcctaagaattggcgcgcataagccgataaactctcgacgtagcgccgttgtccttcggcatataatgtatcaaacgctaacgaactcttcccagagcccgacaatcccgtcacaaccaccagtttatcccgtggaattgtaacatcaatatcttttaaattatgcgctcttgcgccatgaatgacgatcttatcatttgccatgctttacctcttttaatcaatttcactcttaatctctaagatggtatcccgtaacgtagctgcctgttcgaagtccagtttcttggccgcattccgcatttgttcagataaccgttctaccatttctagtttttcagctttcgacatactatcgaaatcaatctcgttggtcatcttgacttcttcagggtgttcgactgattgaacaaccgaaatcgcatcccgaactggtttgataatcgtcttcggcgtcatgtgatgtgcttcgttgtaggcttcttgaatcgaacgccgccgcttggtttcatccattgcattgcgcatcgaatcggtaatcttatcggcatacaaaaggacttgcccgttttgattccgagaagcacggccgattgtttgaatcaatgagcgctcgctccgcaagaaaccttctttatcggcatccaaaatcgccactaacgagacttcagggacgtcaatcccttcccgcaacaagttaatcccaattaagacgtcaaacttaccaagccgtaaatcacggataatttccgttcgttccaaagtcttgatatcactatgcaagtaacggactttaatccccagttctttgagatagtcagttaaatcttccgccatcttcttggttaacgttgtaataaagacgcgttcgttcttttcaatccgatcattaatttcgccgaccaaatcatcaatctggcccataatcggccggacctcaatattcggatctaacaagccagttggtcgaataatctgatcgacctgaatatcggtttgttcagcttcataagggcctggagtcgcagaaacgtacatgatttcattgacgtgttcttcgaattcaggtagcgtcaaaggccgattatcaagcgcacttggtaatcggaacccataatcgattaacatttgcttccgggcacgatccccgttatacatcccgcgaatttgcggcatcgttacatgggattcatcaatcatcatgattgaatctttcgggaagaaatcgagcaacgtataaggtggttcccccgccgcacgatcctccatgtgccgtgaatagttttcgatccccgagcaatagcccatttcttgcatcatctcaagatcgtaattcgttcgttgttccaaacgttgggcttccaacaacttgccgtccgccttcaattccgttagtcggccttctaattcagccttgatactcttaatggctttttccatcttttcttcactagtcatgaaatgcgttgctgggaaaatcgcaacatgttcgcgttcaccaatgacttcaccggttagcgcgtcaacttcaacgattcgatcaatctcatcgccgaagaattcaacccgcaacgcatgatcatcacgtgaagccgggaaaatctcgaccacgtcaccacggacgcggaaacggccccgttggaaatcaatgtcgttccgttcaaattgaatatccaccaattgacgcaataagtcattgcgctcaatctccatccctggccgtaacgaaaggacgtgatcttgatattcattcggatcacctaagccgaaaatacatgaaaccgacgcaaccacaatcacatcgttgcgttccaacagcgcactggttgctgaatgccgtagtttgtcgatttcgtcgttaatactcgaatctttttcgatgtaggtatcacttgaaggcacataagcttctggttggtaataatcgtagtaactgacaaaatattctaccgcgttattcgggaaaaattgcttaaactcggcatagagctggcctgccaaagtcttattatgcgaaatgatcaatgttggtttgtttaaattcttgatgacgttcgacatcgtaaaggtcttcccggtcccagtcgcccccatcaagacttgtgcttttgcacccgcctcgaagttcttagttaacgtttcaattgccgctggttggtccccagctggttcatagggcgccactaaatcaaattggttatcattctgtcgttcaatcatcaaaagcctccattaccatttgctagcgataaaagaagacgccgggtagaagttgccctccaccataacgtctacttaccgattttataaagaataatattccttgtcctttaagtcattcactattctaccacaccgaacatactttcgccagagtgctgattaaagagtgcgtcattaagcggttatcctttgaggattagcctaaccagacggattagcgacgcagtcgatgatgcggctggtgtagctaaccggaaaaggatgcttaatgaaagcacgtttcaactaaagtgtggaaacgtgctgttgtcagtagattcctgcgctttgctacacttgtcaaatcgccgcttatagcgtcaattcgccaagttaggcaaatgctctgaatctgagcgactgacaacagcactctattccgctagcgtctgtctcactaattgggttagcttccctcgatctgcgaagtcttcactcagtaaatctggcaagatttcttggatgaaataacgggcgcatgcgagattttggtattgcataatcgtttttaaactttccgcaaaaatttctagaaaagcattctcaggattacctttttcaatttcaccaaaagactcgtagagtaaatcaatcttatcggcaacggctaataattgcccttccaaagtttcatcttttccttcactcaaacgacgttgataccgttcttgtaagaaatctggaatttcatttttaatgaagttagcggttaatgaactttcgacattggccaacatcgtccgcaattcatgcgttgcgtatttgaccggcgtcttaatatcgccgataaaccgttccgtataatcgtggttcagtgcgcgttcgtacagcacttgccaattaatcgtttgcccattttcttcttcaatatcgcctaataattgtgcaatttctgctactttaaaggagtgcgctgcaacggaatgttcttgatatttaaacaatcctggtgcgcgatttagtgtctccaaattattcaaaccttgcaaatattgatgcatacccataccaaactacctcccttttcttacaaaaatagaccgactaacgcagtagtccgtctatttactgttctttattataggtaagttatcctgaaatgtaaaacagaagccctatctattttacaagttcatgaattgctttttcgaagtttgctaacttcaaatcagctgttgcggcatcatcagcggatgtccccacatagaatttcacttttggttcagtcccacttgggcgaatcgcaatccaagtgccatcttctaagtgatatttcagaacattagatgttggtaaattgatgggttcagtatgaccgtccgcaaaagtttctgtttgtgtttggaagtcttctgctgaagcgactttgatgccggcaaattcaactgggctttcttcacgacatttaaccatcaagtcagccatttgttgtgggccattgaccccttcgaaatcaactgcagtcgtttgttcagcgaagtagccgtattccgcatataattcttgaatgccatcatacaaagtcttaccgtttgacttgtaataagctgcaacttccgctaataagaccaatgtttgaatcgcatctttatcgcgaacgaatggtttcactaagtagccatagctttcttcgaaaccaaacatgaaggtgttttcgtctgtgtcttcaaagtgttgaatttgttcagcgataaatttgaagccggttaagacatcaatcatcttcacattgtagctcgctgcaatcttcgttgccaattctgttgacacgattgacttaacagccgctgcattggctggtaatgtgccagcatctttactagcttgtaaaatataacgtaataaaacagaagcgatttggttcccagtcatcaattggtaactcccgtctggttgacgcacagcggcgcccaaacggtcagcatctggatcagtcgcaatcaacaagtcagcttgttgtgctttcccgagctcaatcgccatatcgaatgtttgtgggaattctggattagggaatggtgtcgttgcaaattctggatcagcaactgcttgttcagcgaccattgtaaattgttcaaagcctgcttgacgcaatgcgcgttcaccaagtactttcccggtcccatgaagtggggtgtaaatcaatgacatggtcttgccgactgtgtcgaccaattcttgattaatcgtgacttgcttaacttcagctaagtaagcttgatccacattttcgccaatcaaagtcattaagccggcttcgcgcaatgtgctttcatcagccacttcaatcgcaaataaatcggttactttgcgaatataacttgtgattaaatcggattccttaggtggcatttgcgcgccgtctttgccataaatcttgtaaccattgtattgtttaggattatgacttgctgtaatcatgataccggcataggtatgtaagtgccgtacggtaaatgataattcaggtgttgggcgtaaggcatcaaaaacaaacgttgggatttgatgttgacctaagacccgcgctgcttcgtgcgcaaatgtttcagattgataacgtgaatcaaaactgatagccacaccgcgttttttagtcgcttctggtaatgttttcatgaattgagcgaggccttctgtggcttgacgcaccgtataaatgttcatgcagttgatcccagggcctaaaataccgcgcatcccagctgtcccaaattccattggaacgctaaatgctttttctaatgcatcatggtcgtttgccatttcgttaagtgctttttttaaaggtaaatccatttctgtttgattattccaaattgcataattatcttgccagctcattgtgtaacccccgcattttagtctaaaagctagttctaagtataccataatcaaccgctttcctaaagcatcggttgtacggtaatgcgcaccaagctaattgtctgggtcgattatttaataatgcttgtccttctaaaaattaaaattttttccaaaataaaaaacggccgactaaaatttagtcgaccgctagaaatgtgcgtcataagccacatttttaggttaatcctcaaaaataaaatcgtttcgaacgcactctaatcgtgcttcctcgaactgtcttttctggttaaccctgaatgtcaaacgattgctaccgcaatccttcgccattctgtgttaatcctcggaagctaaccggctgccgtcgcactctagatactttgtaagtatttaaatacttcttggcctgctatgccgccgtcgccaactgctgttgtaatttgacgaagatctttttcacgaacgtcaccaattgcgtagatacctggaacactggttgccatgtggtcatccgttttaatccaaccggcatccgttagaatccctagatcaccaaaggcactagtcattggttcaatccctacatagatgaagaccccacttgcagcaacttctttggtttcaccagttgccttatcaatataagtgacaccggttaccttcttgtcgtcaccttcaatagttgtcacttgtgcattccagatgaagtccatcttgtcattagcaaatgcacgatcttgtaaaatcttttgagcgcgtagttcatcacgacgatgaatgactgtcaccttgctggctaattgcgtcaagtagaggccttcttcaatcgctgaatcgcccccaccaatgaccacgacttctttattcttaaagaaggcaccatcacagaccgcacagtatgagacaccacgaccgccgaattcatcttcaccggggatcccaatcttcttgtgttctgaacccgttgcaatgatgattgaacgcgcttcgaaatcgccttcgtcagtgtgcacaatcttcatctcgccttgcagttcaatcgagttgaccgtaccatagccgtattcagcaccaaattgagtggcgctagcatacatcttttcgcctagttcaggaccaaggattgatttaaagccgggataattttcgacctctgctgtattattcatttggcccccgtaaattccgcggtccaacatcaatacagataaattcgcacgtgaggcgtataaagcagccgtcatcccaccaggtccagcgccaatcacaattacatcataacttttagccatgtctattatccccttacttttaaaaagtgctcgttcttcatagaatgtatcttacccgttatgtaaaaaaaagtctaccaaactgttttaccagtttgatggacttgttggtttcaattcttgtaataattcagtggcttcggcatcgaaatccgaatcgtcactctgtaaataagcagtcgctaattcatagctagcctgcgtctgatttaaaaaggcatacgccgttgctaaaaaatattgtaactcaggatgactctgatagttggcggttggaatttcttccagaacggtcgccgcaccatgatagtcgccaaccgattccaaacaaatcgctaattggcacaccacaaagatgtaatcatctttggtcttagccagcgactttgcccgttgtaaacacgttaatgcgcgcgtgtactgaaatcgttcaaacgcctgcatccctctgtcaaaataaaactcacaagttggtcttacagataccaaatcgcccataaagtaatcggttctcctttagcctttttctcaacgctaatcatcataacacactctgatgatgggtgcgatacccattcaaaatgatgccgctttattcgttaaaaagttttagacttcatcaaaatcgatttcaggtttacctgaacgccgcattaaatacgcaatttcagtcttaatatcacaatcttcatacaatacattatagatggcccgtgtgattggcatatcaacagaacgttgttgagccaattcataggctgctttacatgttgcgaccccttcgacgaccatccccatattggctagcacatcagctaatttttgacctttaccaagtgcatttcccgcacgccagtttcttgagtgaacactggtcccagtcacgattaaatccccaacaccggataatccgataaaggttaatgggttagcccccatggcaacgcctaagcgggaaatttcagctaagccacgcgtcatcaaggcggccttcgtattatctccataaccaagcccgtttaaagcacccgcgccaagtgcaatgacgtttttcaaagcagctcccatctcaacaccaaccacatcagggttggtatataagcggaaataatcattcatgaaaatctcttggatccattgggcttgaatcaagtcacttgatgcggcagttaaggtagtaatatctttttgtgcgacatcttcagcatgactaggacccgataaaacaacaatcccattgcggttggtttctggaatggcttctgtcaagacttctgaaatccgtttgtgcgtgccttgttcaagcccttttgaagccgtcacaatcacgggtttcacttttttcgcaatcatcacaggaacaatctgttccgccaccgcacgaatcgcttgtgttggaattacaaacaagacaacatcaacttggtcaagtgcaacgttaagatcaatcgttgcgtgtaactggggatcaattttaaaatctggtaaataatgtgtattggtatgctgttcatttatttcagcgacttttttaggatcattgccccacaactcaacttggtggccattttccactaataagtttgctaagatggtcccccatgaaccggcccctaaaactgcaatttttactgtcatctgataattctccttttaaacaaatccctatttctgttcttttgcttgattgccggttaaataatccggtaactgactgtgcttacgccgccaaatccaaagaccaattgcaccaaagaataagacgagtgagacaatctgcgatacccgcaatggaccgatgaataaactatcagtccgcatgccttcaatgaagaaccggccaaacgaataccaaattaaatagctaaataagatttcgccttgtttaaaccaaccagttcgatggcgaatgctcatgatgctaataaaccctaatacattccatgctgattcatataagaatgtcggctgacgatacgcaccatcaattaacatctgttggatcacccaatcaggtaagtgtaacgattggagaaagtgcaatgttgttggcgccccataggcttcttggttcataaagttgccccaacgtccgattgcttgtgcgatcatcacggttggtgccgcaatatccaacactaaccaaggcgatagtgcatgacgccgacaatagataatgaacacaatggcagctgcaatcagtccaccgtaaatcgcgatcccgccgtgccaaatctgaataatttcgccgggattggcttggtaatacgaccattcaaaaacgacgtaatacagtcgggccccaattaaggcaaatggtaatgcccataaaattaaatttaaaatatcatcttcactgacattgcgccgtttagcttcctgtaatgccaatccaacggctaaaacgaccccagttgcgataatcacaccataccagtggatctccaatgcgcccaatcgtaatgcaatcggatttaatgcgcctaatagtagattcaaattattcgctccttttgtaaatgtgctttcatcaaaacgtacttttcaagctaactttctgcgcttagcgtcgtgaagcaaacaatcgactgcgtcgcttatcgcttcactgtgctaatacgcaaaagttggacaagcttgaatgcactcttatccgaaacgtgctccgtaagccatatccttccggttacccctgaatgtcaaacgattactgacgcaatccttcgccattctgtgttaaacctcaggatatacccggcttactgcgcactctaaaaaagactagtttgcatactgtctttctaacagtatagctcaaactagtcattagacctaccatatttaacgaacttttctgacttttaactattcttcttcatctgaattggcttcaattaacttgcctagattggcttcgaaggtcttcgttgcatcatagcccattgatttagcccggaagttcattgccgccacttcaataatgatggccaagttccgcccgactttaacgggcacggtaatcttcggtacagggacgtcgaaaatcatttgttcttcggtatctgaacctaagcgatcgtatttcttatcctgtgaccaattttgcaagtggacaattaacgaaattgacgtttcagcccgcaccgcaccagcaccaaagaggttcatcacatcgataatcccgatgcctcgaatttcaagtaagtgacgcaaaattgcaggtgcttcaccgaccacagtttgttcatcttgttgataaacgtcgacccgatcatcagcaatcaaccgatgcccccgtttgactaattccaatgccgtttcgctcttcccaacacctgaatcgccggtaattaaaacacctaaaccgtaaatatcgactaacacaccatgcattgagcgccgttcagctagcttcccttccaaataatcggttactaaactcgacaaacgcgttgtcgataaattcgaccccaacacgggaatccccgcttcttcagctgctttaagcatttccattggcggttctaattggcgcgagaccaagaaacagggcgtatcttcagaagccatccgacgcataatcattaaccgttcttctggtgtcatattttgcgtaaatgaaacttccgtccgtccaaataattgcacccgctcgtaagggtagtaattaaagtagcccgttaattcgagtcctggacgggaaatatcactcaccgtcactgctttattttttaaatatgcttcaccggcataaacttgtaattttaaatcggtgactagtttttgaattgaaacactatcagccatgagttacccgtccttcattttcacttatatcctctatcatattgcttttaaggtgatttttcaactttaatgtaggcgttttcttatctaaacaaaaaaacgggcccaatgtcaatcttaattgacgtcagtcccgctaactttttaataacgctctctcacaaattgatttgtaataatcgtattggcaattgataaaatgattgccacgatcacggctgctccaaaacttgtaaagctaaagtgggcgccgacgaaaacagcggtcaattctaacataatcccgttaatcacgacactaaacaaaccgaatgttaaaaacgtaattggaaatgagagtaagctcaacaatggtttaataaagatgtttaaaatcgataacacaatgctggcgactaacgcgatccaaatgttttcaacataaaacaagtttggtaatagaccagaaatcgcgatgaataacagcgtatcaacaattacgcgtgtccaataacgcattagaaatcactccagtcgtcatcgtctactttgacatcccgggcttccttgcgttgacggctaccttgatgtgctgtttcttgataagaatagtcttggtagtcatggcgccagtctgcatgccgaggacgtctacttggaccaacaattgcccgatagatgaagctgacaattaacccaatcacaatcagtggtagcgcaaattttaataataacagtagcgagccaatcacgagactaaacacgccaactgccgccataatggcgataatgactaataaaatcattaaaaaaggcattaaaactcactccattcactttcagaatcatgtttactctgacgtggccgttctggaatcaccatcactaagatgatgtagaccacaatcccagggaacgctgctgaaaacattgagaatacaacatatagaattcgaactaatgtcgcatcaatattaaaatactcagcaatcccgcccattacaccagaaatcattttgttatctcttgatttataaagtcttttccccattgttaaaacccaccattccttaattttttagttatcgttgtctttcaataaaatattaccagttgtcgtgcttaatgttaaacgagctgcctgttcattgtcgttacggccaagttgtaacatttgattccccgtactttgccgttgttcgatggtttgggtgtttgcaagccgatttttaatcatcccaaaacgcgtgcgggcatcaacagtcattgccaaagtttgtggtaaagctgtcttgattgtgccattcacagattttgcttttagatgttgtaaatcagttgtcgtcaaagtgttcttgatatccccgttgaccgttgaaacactcgcatttaaaacttgcgcttgaatcaataggttaccgttgacggttgttgcgagtaaatcatcgtaacggccttgatcaaaggtaatgccaccgttgacgttttcagcttccaccattgcagcgttggtgctgattaacgttaattcaccgttagtcgtcttcaagtaaatatcccggccggtaaagccatctaattcaacatccccgttcaataacttcacattcgtttgtaagtagttattggctggtaagtagaacgttaagtccgcttgaatccgtttattcggcacttggaagaccaagtcggcatcagtcacatcaattgtactgcgcgcttcaaaagcagccaatggtgttgcttctgccattttaccatataacttcacttgcgctgcgactttgacttctggacgatcccagatttggaaatgtacactaccgttagccactttgacgttaatcatttctggtgttacgtcagaataaacgaattcatggctgaacttttcagttgccaaaccaggcaccttaaagtttacttctttccaatccacattatccatgactgttttggcagtattcttcacgaacttaccaaagtgtgtgctagcttcgcctaacttatcgctcaattcatcaaatgtttcactggcattttctttccagtcatctgataagcctaatttttctgaccattgatttttggtcatttggcggcgttctttttcgatttggttgagttcatccgtcagtgcttcgcgtttggcttccaactcgtcgacttcagcttgcttttgtaataagccagccttgagtgtttgccgttcggttgctttttcactgcttaaactatctaaatcttccatcgtatcaaggacagtgacttgttcttgatcagcgtgcattgcttgcttcaaatcttgcaactgccggttaacgccggaaaggttaacggttaattcgtgtgccttttcttcaattgcgcttttatcagcggttggttgttcagtttgctccgttgctgtttcagttggatttgattttacatcttggtcatttttggctaaattttctaataagactaatgcttcttctgaagttaaaataccttggttcactaagtctaaaattcgttgacgttcattcattgttttgacctccattgatcattcgttgtactgtttcacttgactatgactctattatgccgattttacagtcgattgtcataggtccaaaggttgatttttatttaggtatcaagagtgagaacaaaaaaagcgcaggacaaaattatttttgtcctgcgcttttttgcttaaacgatttgtcctgtgtaaggttcgccggcgacaaattggaaatcaaaggttgctaattcatccacactggttagacattgggtaatccctttagccaacattaggttgatgggattggcttgtaaatcatcttcacaaacaaagacgattggtttatgacaggcattcaagtagccgacttcaaacgccgttcccgtatcttcgtcttgcatatcccataacacaactgccatgtctgctaaatccattgctgtgatgtcgttttgatacgtttggttggcccattcgtaacccccgaacatgccttctggatcatgatcttctgtcacacccttgtattgatgctcctgtggactatgaatataaccaatcgttgggttttgttttaaagccgcgtgtgcgcgttccactaatgaggcctgtttaggtgtaaaccaaccgccagctaagtatatttgtttttgcattatgattctcccactaaaaaagcgacgagcaagtcgaccttgtcatcgctttttaaaatttttaattgaattgtttagaattcatcttcttgtgcattggagtttaattccactaccttaccggttctgaggtagacaatccattcacagatgtttgtcacgtaatcgccaatccgttcgaggtagcttgcaactaacatgtagtccatgctcccaacgacggtttctgaatcacgttgcatttctttgatacagtcgtcataaatattgtctgaataagcattgattgcaacatcttcatcggcaattttgatggccttcttacgatcttctttgacgtaagcgtccaatacctcttcaaccatttgtttaactttgtctgccatatccgcaatatctttttcgatatcagggacacgggtattacccttgacccgaatcgttgatttcgcgattgaaacggcgtggtcacccatccgttctaaatctgaactagccttcatgattgtgacaatcacgcgaaggtcagttgagaccggttgttgaagtgcgattaactcaaaactcttacgttccaaatccgtttcccgttcattaatctgatgatcgtcagcaatcacctcgcgtgcgagttgcttatcgtgattaatgaaggctttaacagatttatagatggcttcgttgaccatcatccccatttcggagaagcgaacgtgtaaatcatttaactcatcttcaaaaagtcgtctcattgtggtttcccttctttcttagccaaaacggccactgatgtaatcttccgtttctttttcggttgggtttaagaaaatcttcttcgttggtgcgtattcaatcaattcaccttgtaaaaagaatgctgtcttatccgaaatacgagaagcctgatgcatattatgcgtcaccattataatggtatactgttggcgcaattctagcaacatattttcaattttagcactcgaaatagggtctagcgcagaagtcggttcatccattaagatcactttcggtttcacagctaacacccgagcgatacaaacccgctgttgttgaccaccagaaagtgataaagcactttcgtgtaacttatctttgacgtcgtcccaaacggccgcttgtttcaaactactttcaacggcttcatctaagacgcgatgatctttaacaccggataaacgtaagccgtaaacaacattgtcatagattgaaaatgggaatgggttcggttgttggaacaccatgccaacttctttccgtaacttaacggtatccatctcaggcgcataaatatcttggccattcaataagaatttaccggtcaccttcgccgagtcgattaaatcattcattcgattcaagcagcgcaagtaggttgatttcccacaaccagatggcccgatgagcgccgtaatttcattttcaacaaaatccatattaatcccttttaaggcctcattcttaccatagaatagatgcacatctgaggattcaataatcttatttgccacggggcaaacctccttgcgtcctagccaaagtgaccagaaacataatcttcggccgctttaatcttcggccgggtaaacattttacgtgtttcgtcgaattcaagtgcgtgccctgaatggaaaaaggccgtgtaatcactgattcgtgctgcttgttgcatgttatgcgtcacaatgatgattgtaaattcttcttttaagcgaatcaatgtttcttcaaccgtgttcgttgaaattggatcaagagctgaagccggttcgtccaataataaaatatcgggtttcatcgcaattgcccgggcaatacataaccgttgttgttgcccaccagatagtgccaatgcgctctttcctaatgaatctttgacttgatcccacaaagcagcttgttttagtgacgtttcaaccacttcatccagatactttttgtctttttgtccatgttgtttcaaggcaaaagtgatgttgtcatagattgatttggcaaatggattaggccgttggaacaccatgccgatatgttcccgcatcttatacacatcaacgtcatcgctattgatgttcaagccccggtacataatcttaccggtcacacgtgtattagcaatattgtcattcatccggtttaaactccgaagataggttgactttcctgaaccagaagcgccgattaacgcggtaattcgatagcgttcaaattgcaatgatgcatcgtgcatcgcgcgtttgtcgccgtaatagacgtttaaatcttcagttgataaggcaatttcatgttttggttcatctaaatgtttgatgtgcgtttttgttaaatcgtaatctgccattattttctcctatgctgctgtcattttacggtagacacgcttgccgatgacccgtgctaaccagttaaatagtaaaacggcgatgattaagacggcagatgcgccagcagaaaccgcagtcgcatccggcataatcccttccgagttaatcttccaaatgtgcaccgctaatgtttccgcaggtcgcaatggattcaacggactcgcgatgtacattgggttccagttggtaaaatcaagtgatggggcactttgtccagctgtataaatcaaggcagccgcttcaccaaagacccggccagcgcctaaaatcatcccggtaataatgttgggtaacgcttctggaatcacgacatgcttaaccgtttcataacgcgataaaccaagtgcaagacctgcttcacgttgtgtgaagtgaattgattttaaagcatcttccacattccgcgttaacaacggtaaattgaaaacggtcaaggctaaagcacccgctaagattgaaaagcctagcttaaactggataacaaagaccaagaaaccgaataacccgaccacgacggatggtaaggaacttaacacttcaatcgcggtccgaacaacattcgtcacccagttcttcggcgcatattctgcgagatagatgccggcaccaattgataacggtactgaaatcaccatcgccaaaattaatagatagaatgaattaaacagttggacgccaatcccgccacctttagtaaaggtttgcgcaggtttcgttaaaaactgccacgtcacgtgtggtaatccgcgcaccaagatatagccgagcaaacttgctaataataatacgatcaaaccagcgatgagggttagcacaccggtggcaactttatcccatttttttgcatccattagcgacccattgctcccttccgaccaattaaacgaactaataagttaaatagtagtgacatcaataataagagtaacgccaatgaccaaagtgcattattggctaatgaacccatgaccgtattcccaatgcccatcgttaacacactcgttaacgttgaggctggggtaattaagttatgtggtaataacgcagcgttcccgatgaccatttggacggccaatgcttcaccaaacgcccgggccatcccgaaaacaaccccggttaaaatccctggtgtggctgcttttaaaacgactttccatgttgtttgccaacgcgttgcacctaaagcgagtgaggcttcgcgataatgccgtggcacactcttgagtgcatcgactgtcatcgatgtcacagttggtagaatcatgacgaacaaaacacaagtcccggcaagaatcccaaagccactgccaccaaacaaatgacggacagctggtacaatcacggataatccgataaacccgtaaacaactgatggaatcccaacgagcaattccatcactggttgcaatactttttcaccccgcttaggtgagatttcagtcataaaaatcccagcgccaattgcaaacggtgttgctaataaagccgctaagaaagtcactccaaatgaccccataatcattggtaaggcgcccacttctggtcgaccatgactatctttcaaacttggattccaattagactgcgttaaaaagcggcctagattgattttatctttaaagaaggtcgctaacccttttgaagcgacgaagtagaaaatggcgagcacgatgaacacgattaaactaatacagaataaactgattaatttgccccgtgtttcacttttggctgcgcgtgatttcttaagtaaacttgctttaattggatccataattggccccctacttaacctttgtaattgtgccatcaaccgaccgttcaaccgtcatcttagcaactggaatatagcccatcttgccgacttgtttatgttgaacctcatctgataagacatacgccaagaaacgttttgttaacccagttggttgccccttggtgtaaacatgttcatatgaccagattggccatgcattagtcatcacgttttcatcggttggtgcaatgccgtttaatttaaccattgcaatcgaatcatctacgtatgaaaaagcaagataactgatggcccctggcgtgttcgctacaattgatcgcaccatccccgttgaatcttgttcttgagcgggtttagtcttgcgcgacttcatcacccattgttcaaacgtcgtccgcgtcccactaccttgggctcggtttactaaaacaaccggctgatctggtccaccaacgtcttgccagttatcaatttcgccactaaaaatcttcgcgagttgcgtcaatgttaagtttttaatccctaattgcttattaatgactggggtaatgccgacaacagccacgcgatgatcgaccagcttgtccgctttaatgccagccttttcttcagcaaataaatcagaattccccatctgtacagcgccagattgaatctgactcaagccagtcccagaaccgcccccctggacgttaatgaactgaccgctgtgatcagcactgtattgttcagctaacgcttcaatcagcggctgaagggctgatgagccgaccgccgttacggactgaccattttgtttagactggcaaccagccaatagtaataaactgaatgtgactaataagccaataacattacgtttgcgcatgttaatcctccacgaattccatttaaacctcgtaagttccattataaaaaaggtttgtaaaaactaagcctatcaaatgtaaattttgtgtaaatcaagcgtttggtagcttcaaaatgaattcactaccgacacctaattgactctttacggtcaactgcccctctaaactggcggtaatctcgctagcaattgctagtccaaggccggtcccgctcttatgggtcgcgcgcgcttgatcaacccgatagaatcgttcaaaaattctttcttgtaggtcacttggaatgcccaaaccggtatcgacaacgcggataccaatttgatctttttcaagttgcacggcaatcaccaacgagccgttttgtttattatacgtgatggcgttagcgattaggtttttcaagatttgattaaacttcattttctgaattctaatcgctaaatccgttggaatatcaacggagacgtgtaactgcttttgttgtgccttttgttgcatcagttcgagattagcctgcaccaattcacgtacattcacaagttgctcttgcgattggtccttacgatctagatgcgaaagcgccaaaatatcttgaatcagcgcagttaatcgcgtactttcgtcatagatgatttgtaagaattgcttttgcgtggcaggatcttccgccgcaccagctaacaacgtctcagcaaagcctgtaatagccgtcaccggcgtcttcaattcatgactcacattgctgacaaaatccaactgcatctgctcaacgcgccggacatcggttaaatcatataaaatgactaatgcttggaatttcgatttaaccgtattgagttggacaacattcgcatccacaaaccgttcttgattttgaatcaactgaatttcttggtgatgactctttcggtacctaaaagtgtgctcaatcatccgtgttaattcatacgtcttgatatcatcaatataggggtgtttctcagtaacaatcgtcgtctccaataaccgatccattgcttcattgtgcaaaacgacttcacgattttcgttaatcaccatgacgccgaccggtaaatggtcaattaggcggtcaaaactgccctgttgcatggcaatcttctgccgcatatgccgcatatcaccatttaatttattaatttcttgcgcgaggatatataatgacgcatctttttgaaaaataatcggttcgggcacttcttcatgccgaatatgatgaatattagcgactaaaattttcaagtggtcaaagaaatgatggcgttgccgccagaaacggtatagaaaaatccagctaccgattaaatagacaatcgtgaccgataaagcaatcttcggccacgtatgccagaactgttgctgaggcactactaagacaaagttgggccgatctgcttggtgtgcgtaaaacaaatacggttgcttattaactgtttgccgcgtactaaaattggcggcagaatgattccgattgacaatatccgtcactgctttttgcaactttgttttattcggcgattttggcgtcaaaacttgtaagccgttttggcgtaaccacttttgccgatcaaactgtggttgtttgatgattagcgcatagtcggcgccccgttcctttaacatcgcgtcttgttgttgggcaatcaccaaattgacaagcacaataaaacctatgtaaacagccactaaaatagtggctagctgataaaatctaaattgatcatgtttggtcatggttggggtcctccaattgataaccgaaaccacgcaccgtttttaagtaaactggatgacgcggatctgtttcgattttttcccgtaaatgactgacttgaatatcaaccattcgcgtttcggctggataatcaaagccccacaccgcatttaagagtttctcacggctttgaaccttgttaatccgatgcataaagtaaacaaggagttcgaactccttaggcgttaaatggagcttctgagtgccctttttagccacaacttcgccttcatcgaccattaagtcccctacttgtaaaatatcactagggtgcgtttcaacgactgctacaggctgtgccgtccgccgttcaattgcccgaatccgcgcgataatttcgcgtggactaaatggtttagtgacatagtcgtctgcccccacttcgaggccgacaattttatcggtttcgctatccttagccgttagaatcataatcggcgtttttaactttgcctcccgaatcttcttggtaacggtaattccgtctagcttaggcaacattaaatctaaaataataaaatcaaacgactgctgtaaagccatcgtcagcgcttgtgcaccgtcagttgccgtcatcactttaaaatgttcttgttccaggttatagcgtaataatgtcaagattgctggttcatcgtctaccactaaaattgtcttcattcatgccaccctttatttacttaattctctgggaataatacaacgcctaactcatgtggtgcatcagcaaaaattgcgccttcagccatccggaactcaccgtttaaatcttgaacctttaaatggcaatacgttggctgactttgaatcgcccgataaaaattatcgttatttgagacagcctcgccattacattcaacaattgtatcgccaacgaccaaccccattttagcagccggcgtttcgcgtaaaatccctaagataaagacgccatcgtagggtttcgtaaagtgcaactgccgttcatgggcactgcgtctactcaaccgccattgtaatgcacagcttagtactagcgcaactgttaacatgccaataatccagttcggaaatgcaacggcaattaacccaaacccaactaacaacaagccaaagatcaaatagctattggcatttttagtaacaactgatttcattaagcctttgactgctttcaaactaaatcccaataacaatggcaagattaccaagctatatgattgatgcccgatatttaagaccggccaaaaacccaaacttggcatatcaattgcccctggcactaagaaaaagaccggcgcaatataaatttgtcgactcataaagaaggccgtcaaccgccctcgcttgctagtcatcacacgcggtgtcacagttgcctcggcatcccaacgttgtaaaacactattgatgacggtcactaacccaataatcaccaataattcagccaaaagacttgcttgaccttccatctgatattggggccatatgaatgttgcaccagcgtagaccaaagcactgattaaaaaggttgccgatacgttttgccatctagcagccactagcaaactcaaaatagcgattagttgatagaccagccaccattgcatattaaccatcgcccctaacactaaggtacagcaacttaaggctagccctgcgagtagcccatggcccacaaaatggcccacttctatccatcgtggattaatcgcaattctaaaggtcttccgttccaagctaattcgtctatgcgctaaccagccagcatacacaatcgctaaccataaaagtggtgccgttagtaatggtcgcaaaatatcaatgatcatcgtcaattcaacaaacccccagcgtctatatttaaataccgtgcgtgtttccaacgacacacgctcgatttccagctgccgaatttcgcagttatcccaatcagtatagcattttgcccccttaactgcctagggttcaaaaaaaagagtgacgaacaatttaatgttcgccactctttcactaatttagtttaaattttaaggaaacgacgcattgagatgacagaacctaatgccccaatcacaatcccaatcacagccattgttaaatcaagttggaataagaaaattcctggtttcaacattgaataaccggctgaagccatgctgagtgccatatgacggtaaacccaaccataacctaagtcgattacaataatgggaataattaccccaagtaatccaacccaagccccttcaaaaaggaatggccagcgaatatacgagttagttgccccaactaaacgcataattccgatttcgtcgcgccgcgataaaatcgtaatccgaattgtattggaaatcaagaacactgccacaaagagcaataataaagtaaaaccaacgccccatttacggacgctactcattaccttgaacaacttcttagcgttgttcccaccataagtggcatcataaacgtatttcaattttttcgcttgtttagcgactttaatcgtttgacttggttttgtcgtacttactgtgtaaacatcgtacaacggattatcgtctccggtaaacatcttaaatgattgaccgtaactgccgacaaccttgtttaattcctttttacgacttgaatacgtcacttctttaacagacgccattttttcaagtttcttttgtagctgatctttttgtttacttgttgtgccccgttcaatcataacccgcacgtgcacatcattttcaatatcttgtgaaatcttgttaaagttgaagatcatcgcaaagaaaatcccgactaataacaacgttacggtaactgcactaacagctgcgattgacatccagccatttcgttttaaactcttaaaactatcgttgatatgacgcttcaatgttctaatcttcatagccgtagtcaccttctttttcatcacgaactaagcgaccgtcttcaatcgctaagacgcgatgggtccgttcgttcaccatttgtttgttatgggttgccattaagacaatcgtcccacgttcattaattgcttctaaaatatccataataccatctgacgtttcaggatctagattccccgttggttcatcggcaatcaacacatctggccggttcacaatcgcacgtgcaaccgcgacccgttgttgttccccaccagaaagttcatttggaaagcgacgaatttcacccttcaagccaactagttcgagcacttctaatacacgatctttgattgcttgaggttctgcctcgatcacttccatggcgtatgccacgttttcaaacaccgttaaacgtggtaataacttgaaatcttggaaaacaacacccatcttacggcgtaagtatgggacatcgtgatccttcataccgattaaatcaaaaccagcgacttcgatttcaccactcgttgcttttaattgatggtacaacatcttaatgaatgttgatttaccagcaccactgggaccaacaatataagcaaattcgccgggttcaatcgttagcgaaagatccttaattgctgtcacgccatttggatacttttttgacacatttgtcattcgaatcaattggggacactcctttttttgtcgttatcattatttattgtcaatgaaaaccgcaatcttttatattatagcatgctatttattcaaataatcacaatttgattacatttatatttcaatttctttgcagctagtcgggattcttctgactcaactgccattgcagataggcatacataaatggatccaaatcgccatccatgactgcttgcccgtttccggtttcgtagtcggtccggtggtctttaaccatcgtgtacggatggaatacgtatgagcgaatctgtgagccccagccaatttcaagctgttcgcccttaatagcagccgcttttttcgcctgttcttcttgttctttttgatacaatttagccttcaacatattcatcgcagtttcgcggttttgcaattgcgaccgttgcgcctgtgatgaaacaacaatcccagttggtaaatgcgttaaccgcacggctgatgatgttttattgatatgttgcccaccagccccgcttgaacggaagacgtcaattcgtaagtcttcggtgcggacttcgatatcaatcgaatcatccaattccggcatcacatcgactgaacaaaacgaggtgtggcggcgcccagctgaatcaaacggtgaaattcgtacaagccgatggacccctttttcagaacgtaacatgccatacgcgttgtgccctttaatcatcaaggtcacactcttaatcccagcttcttcaccggcctggtaatcttctgtttcaacggtaaagccgtgtgcatctgcccagcgtaagtacatccgcaaaagcattgaaccccaatcctgagattccgtaccaccagcaccaggatgcaattcaacaatcgcgttattgctatcgtagtcgcccgatagtaattgtccgagttcatattgttgcatctgaacttgaacagccgtcaaatcagcttcaaaactcgtctggagttcagcatcgggttcttcttgtaatagctctaatgtcacttgtagctcttctgattgcgcttgaagttgcataaaagcgtcgtatttttcctttatggcgttattttgatcaattaactgttgggctgctttttgatccgaccagaaatcgggatccgccatttgcgcttcattttgcgcgatgctttcttgcaggccatctaagtcaaagtgaccccctaaattgcgttattttagcttcaattgcttctaaaagatgttttgcttcacttaattccatattttagtccctccactattttttcccattaaaaaatggctaagttaactacctcagccattttctacgcgttagcgtcgaatattttgacggatttccgccttcatgaagagccgggttgtatcgtaatcgatgtcgctgatcatttcttcaaacatccggtaaccttcttcttgatattcaaccaatggattcatttgaccgtagccccgtaatccgattgagttgcgtaattgatccattgcatcgatatgatcggtccagcgttcatctaccacacggaggataacgactttttcgaattcgagcatttgatctgcatctgctaattgtttttgttttgttgcgtaattcttttctgcaaaggtcatcaataatgattcgatttcttcagcagtcttaccttgtaatttttcaattggtaattcttcttcactgaccattgaagttgtggcaaatgcgtggattgcttctaattcccagctccccatttcaccttgtgtatgcaattgcacaatccgtttaacggttcttgaaatcattggcatgataacttctttcaaattatcttccgccatgatgacctgcatccgttgtttatagatgacttcacgttgttcacgcatcacatcatcgtattgaagggtttgtttacgtgtatcgtagttattcccttcaacccgtttttgtgcggcttcaacttgacgcgtaatcatcttactttggatcaccgcatcgtcatctgaaatcttcatccggtctaggaaggctttaatccgttctgaaccgaaacgtttcatcaagtcatcttccaatgacatgtagaattgtgtgacaccaggatccccttgacgaccagcacggcctcgaagttggttatcaatccggcgtgattcatgacgttcagtcccaataacagccaaaccgcctaaatccgtcacaccaggtcctaatttaatatcagtcccacgaccagccatattagtagcgatagtgaccgcaccacgttgaccagcattcatgataatttcagcttctttaaagtgattcttagcattcaaaacagcgtgtggcacgttattttcatctagtaatcgcgatagtaattctgaagattcaaccgcaacggtcccaaccaatactggttggcccttagtataacgttccttgatatcttcaataaccgccttaaatttactttccaaagttggataaagcacatctggtttatcgattcgggcaattgggcggttagttggaattgagataacttccatgttgtaaatttcgcggaattcttcttcttcggtcttcgccgtcccagtcatccctgataacttgttgtacattctaaaataattttggtatgtgatattcgccattgttttggtttcatcttggatttcaacgccttctttggcttcaatcgcttgatgtaatccatctgaataacgacgaccatccatcacacgacctgtaaattggtcaacaattaggacttcgccttcttgaaccacataatcaatgtcttttaacatgatatagttggcccgtaatgattcgtccaaatgatgcgtcaaggctgtattttcagtgtcatataaattgtccaagccgaagttagcctcagctttttcaatccctgattctgttagactgatggtctttgttggccaatcaatcttatagtcagtttcttcttttaaagttttaacaaaacgatcagcacggatataaagtgctgttgacttttcagcttgaccagaaataatcaatggtgtccgcgcttcatcaattaaaattgaatccacttcatcgacaatggcaaagttcaatggtcgttgaaccatttcttctttgtaaaccaccatgttatcgcgcaagtaatcaaacccaagttcactattcgttgaataagtgatatctgagttgtatgcgtcgcgtttttcttctggtgtcttagcatttaagtttaacccaacagaaagaccgagccagttatataattcacccatttccgttgcatcacgacttgaaaggtattcgttgacggtaacaacgtgaacgcctttaccagccaatgcatttaaataaacaggcatggtagccgttaaggttttcccttcaccagttttcatttcagcgatgttaccttcgtgtagcgtaatcccaccaataatttgtacacggaacgggaataaccctaaaacacgtttagcaccttcacgcgcaaccgcaaaagcttctggtaaaatatcgtctaatgtttcaccatttgctaatcttgttttgaattctggggtcttagcttgcaacgcttcatcagataaattactatattcatcttcatagctttgaacttgatcggcaattttgcccattcgcgctacttcacgtttatcgctttctacccatgtttttagaaagtttgccatgtgcgtcaattctcctctagaaatacgtttgagttcttaaatagcgatttcttatatagtcaatatgattactaacaattcattttaccatttattacaatcaaataaaaccctgtcacagtaaacaatccagccaattcagtaaaaatttaaccccattatctatatggctacaaaaaaagggctgagcgcaactcatcgttgtcccagccctaacttaacgttcacttattcatcagtttcaatcaaaccgtaacgaccatcttgacgtttataaacaatgcttgtaccgtttgtttctgaatcttcgaagatgaagaactcatggcctagcatattcatttgtaagattgcttcttcactatccattggtttcaatgaaacgcgttttgttcgaacgacttgcattgattcttctggtaatgcttctgcttctggcaccgttaattccatacctttaatcccgcgttcacgtgatttacggttaatctttgttttaaatttacgaatttgtctttctaatttatcagtaactaggtcgacgctaccatacatatcaggcgatgtttcttctgctcttaatacaaggtatggtaatggaatggtgacttccaccttagcggttttatcggagtacacttttaaattaacgtgtgcagttgcggtcgctgaatcatcgaaatatttttcgagtttgctgattttcttttcaacataactccgaattgcgtcagttacctcaatattttcaccacgaacattaaaacttagcatatgaattctcccctttcacaaataccccctgtgggcacttgtcgctcggaactcaattctttcccgaggctttgttactgacttcattatatataatttgcgcgtaacacacaaataatatggtcctagtggactaaagtaattgcgtgaattggcagcgtttggtatcgcttgcggagacactgctgagcatgccataacgtgcgcccagtggtataaatatcatccaacaaaattaactgctgcaccttggaacccaacagcacgttctgcgcgcatttaaaaaattgcggcgttgctaagcgctctgcacgatttttttgtgcttgtcctttttcagttggtagcttctgcaacaatggggtcagtggaaaacagtcctcgtataagccaaccaccggattgaatccgcggctttgcaaatgtgttggatcagtcgggactgggatatacgccgtttgccgttgcacaggaaaattttctcgaatcagccgttgaaatacgtgacgtaatcgataatccccctgccccttatagcgttgaaaatactgttgcattggttcgttgtatgttaacaacgctcgattagtaaattgttcgcctggatacagttgctgccatctctggcaatccggacacaccccctgggttgtcatttgccgaccacatcccgaacaacactgcggcccaatccgttcaaactgtgccatgcaacgtgaacagatcatcgccggatagactggtcgcaatgaacaaatcaatgcaatggagggttgttcaaggataactgccgcacacattaaacagtggattgtaatcgccgtccttttcgattttgtcgtttaatttgttgacacgcacgctgaatagcgaccgtgtaatccgcgtagaaaaaataaaccggattggcagcatgctcttgctgtcgtccggctcggccagcaatctgtacaagcactgattcagtgaagaccacgtgttctgcaccaagaacaaacactgcaatatttttaaacgttacgcctcgttctagaactgtcgtcgtaatcagcacgtccccgcatcctgctctaaaggccgctatcttgtctaattgattaggatcgccagcatgtaccgtgttcactgtaatgtgtggcaatgcccgaacaacgctctgctgaaccgcctctaaatcccttacctgtggcacaaataataataagcgttgttcttgaagacacttcctgagtaagttgcgcgtcacggatggtaactgatgccgtttaactgaacgccgccacgtaaacaagggatagcaatgcggttcaggtaataagtgaccatgaaagcgaattggtagctcactacccgttaaatcccctgtattaatcgcatggcgcaactttacagttggtgtcgccgtcagatagatcaatgcacagcatggcttacacgcctgtttaacagccatctcaagctggggattattgacaaatgggaacgcatcaacctcatcgacaatgacagtgtcaaatgcctgataaaacttaaataactgatgggttgtacaaacaactaacggcgtataccggtaaggcgcagtctgttccccatgcatcagcatgattggtgtgttagcaaacgctgcttgcaagcgcggatagagttctaaacaaaccgccacccgcggcgcagcaacacacacacgctgcccattagctaaagccgtcgcaatgccttgaaataacatctcagttttaccagcaccggtcactgcagttaagacatggcgttgttgcttggtaatgaccgcaacaatctgctttgcggcttgtgcttgaaaaggggttagtgtccccgaccaagttagcggttctacgatcgactcaaacagattgcattcaggcacgtaaaccaactgatccccttccactaaccgcccaaaggtcaagcaagcagcacaataataccgaccatcaggtaagcgagcttgctctttcaccacttgtccacaccgttgacataccagacgctgattaactatttgaaacgctagtcgctgtttaatctgtggtaaactataattattcataacggtactcaattgggtggcactccactgacgaccataagcaagttgttttgccatcatttcaccttccatccttagttccgttaaatccagcttattttttcaaggagtccggtatgcaaagttattttaccgttcaaaaagacggcgaatttgaactcgaaatcaaaaagtcacgcttcatctgtcatgttgcgcgtgtcacagacgaaaccgcagcacaagcgttcatcgcacaagttcgcaaagcaaatctgaaggccaatcataattgtttcgcctaccaattaggtttaacggccaatattcaaaaacaaagtgacgatggcgagccaagtggcacagccggcgtgccaatgttagaagtactgcgccagatgcagctcactaatctgtgtgtcgttgtcacccgctattttggtggcatcaaacttggtactggtggtcttattcgagcatacagtcacgccacttcggccggacttgaacacctcggtattgtccaaggtatcgaacaaaccgcttgtcagattacaattgactacgctcaatttgacactgtgcaaaatttacttagccaattaaacctcactgccgaagacatccaatatacgactaacattcaaatgaccgtctggttagcgactacagcagttagtgatttacaacaacaattaaccgaacgcctcaacggccaattacaattcgaccttggccctcaacaattcaacgaagtccccattagcgcacaggatttacaccagattcgctaccaataacgcaagaaaaggattagccaatggctaatccttttcttcattcttcggttttaataatcgttttaaaagcatcaataatgggcggcgattgtcaccaagtaacccaattgattcaacaaataattctaagccaattaagacggctaccgtcaatgccaagcttccccagagtgtcgatagtgggtagagcaatgaaatcaacgagaagaccaatgccagtccataaatcacgagaaccgtttggcgatgtgataaaccaagttgcatcaaacgatggtgtaaatgatgtttatctgcttgtgaaatgggctttttattcaaaattcggcgcaacattgcgtaaattgtatccgtaattggtacaccgagaataataactggaatcaataacgtaatgaacgtcacgttttttaaacctttgagcgataagaccgcaatcataaaaccaatgaataaggccccggtatcccccaagaaaatcttcgctggatggaagttatgtggtaagaaaccgattaatgcagcgaccaaacaaaaaatcatgattgagacgctgacattggtgattgataagaagaaataggcgatgacgcccattgtgaagagtgcgataatcgaaacgccagttgctaagccatccaacccatcaatcagattaacggcgttggtaattgccagaatccaaaaaatggtgattgggaagcttaaccatcctagttcaaaggtgcctaaaaatggaattgtcaaaatattcatgcggacgcccgctaagaaataaatgaccaatgctgctaataaaataccgagcatcttttcctttggattcaattccttaatatcatcgatcatcccagtgatgatgatgatacattctgctaagaagatactgaaaagttcgtgtgtttggaattgcccgcgtaataatacgaaggtcccaaacgtaaacgcgataaaaatggccagaccacccattgccggcatcgcctttttattcactcggcgggcatttggtttatcaactgcgcctaaaacaaacgcgaggcggcgcactaatggggtaattgcggccgatacgagcatcgtcgcaaatagaccaactataattttaaacatgggttgcattcaacttgcctactttctcttgcattctctttattatacaaatcaaacccgttaaacacaacaatgacttgatttcttaagcaaaagccaagcaccctgattatctgtcccgcacaatctgggttaataaggccgtaaatcgtggatcagcattaaagggatgaatgtaatcaaattgttcgccttgattatccataaaatagtcccgattttcaacatcaatctcttcgatagtttccaaacaatccgcaacaaagcccggggttaggaccaaaatttttctaacgccttcttgggctaatgactgcatcgtagtgctagtgccggtgttagccattcattcggtccaaacttagattggtatgtggtccgaaaagtttgtttaggcaagcgcgcctgcaatagcgcagtagttgcttcacactgtgcttggtacggatccccttttgttacgtacgactttggaatcccatggtatgacaaaataatttcgtcataggtttgcgtctgtagcttctgttcaatcgccgttgccatcaagtcgatatagcctgagcgttgataaaagtccttcacaaaatgcaaagttggcatgtttgattgttttaaataaaactgcgcaactacatcataaatcgacatcgtcgtagtcgttgaatattgcgaatacattggcacgaccgccaaatcatcgattcccgccgtttgaatctcactaagcacatcggttaagaatggttgactatatgacatcgcctcaaaaacttgataatcgggtaattcagcttgtaattgagcaacttgctgttgcatgtacacttttaacggggaccagccgtcgtccagattttgcggtaggccgcccgcacttttttcggccgcgccatcagaatcggtccatataaaatggggagccaaaccgctttgggcatcgcaacgacccgctgatcagctaagaaatgttttaaaaaatggcgaatttctttgacttctggtttatctggggtccccaaattaactaataacacaccttctttcatgataatgtcctccacaattttaattaaaaccaaaaaaagagcggggaacaaaattggttttgtcccccgcttcaatgttaggccaatccgcattacttcgcgtattcgaccgttcttgtttcgcgaatcacagtcaccttaatgtggccaggatactcgagttggttctcaatttgattcttcacatcacgtgctaagacggttgcttggtcatctgtgacttgttctggtttaacaatcacccgaacttcacgacccgcttgaatcgcaaaactatgatcaacacctttaaaactattcgtaatactttcaagtttttcaagacggtgaatgtagttttcaagtgattcagaacgtgcacccggccgagccgctgaaatcgcgtcagcagctgcgactaagactgagataatcgatgttgcttcagtatcaccatggtgtgaaccaattgcgttaatcaccgttgccggttccttataacgcgttgctagttcaaccccaatttcaacgtgggagccatcgacttcatggtcgagggccttaccgatatcgtgtaacaagccagctcgtttagcgagtgtcacatcttcacccaattcagcggctaaaatccccgttaacttggccacttcaattgaatgattcaagacgttttgcccgtaacttgttctgaaatgtaatcgaccaagaatcttgattaaatcaggatgcattgtgtgcacaccaacatcaaagattgcttgttcaccgatttgtctgatttgttcgtccatttccttgcgtgacttatcaaccatttcttcaatccgagctggatgaatccggccatcttgaattaacttctctaatgtcatgcgcgcaatttcgcgacgaatcggatcaaacccactaagcacaactgcttctggcgtatcatcgataatcaggtcaatcccagtcagtgtttccaatgtccggatattccgaccttcacgaccaataatccggcccttcatatcatcatttggtaacgtcacaacagttactgttgtttcagcaaccatatccgctgcactgcgttgaatagcttcagcgactaatgtgcgcgcagtccgatcagcttgttctttagctgtttcttcactttctttgattaaaacagcccgttcatgttcaaggtcttgtttcgtttcatccaaaatgattttttgcgcttcatcatgcgataattcggcaatttcttgcaacttcgctttttgttgctcaactaaagtggcagcttctgcctgcttttcagttagctcttgtgcttgattcgttaaacgattttcacgttgctccaatgaacgttcttttttatccaacgttgcatctttgcgatccattgtttcttcccgttgaatcaaacggttttcttgcttttgtacctcactgcgtcgatctttcaattcattttcaatctcagaacgatagcggtgattttcatcccttgcttccaaaagaatttctttcttccgcgttgcggcttctttttcagctgctgcgattattcctgtggcagtcttatttgcaccatcaatttcacgttcgtgcgccttcttttgtagaacggaaccaactagtaaaccaacgattaacatgatgactgcgaggattaatggaaaagctaagttcattgtttcacctccgcatcatcaaaaattttgaattgcaactttcactgcaaatttttaaagatgttattatgtttagtttttcaacacatagttattttatagtttcataaaccgcctgtcaacttaaactatcggcattgcaaccgttttcgagttcagtcaatcaaatcgaccatcagaataattcggttaagcaatcaaaaaagctgaagcaaaataacttttgcctcagcttaatgattcttattcgtttgaatcgtcatccgtaaagacgtcgagttgtgtttcatcgctttcatctactgggacatccgaaataccatatgcttcccgaactttaagccggacttcatcttgaacttctggatgatcagccaagtaattcttcgcgttctcacgtccttgaccaatgcgttcatccccataggaataccatgacccactcttattaataatgtccttttcgaccgccatgtcgaccagttcacccgtttgtgagatcccttgaccatacataatgtcgacttcagccactttaaatggtggtgccaccttattcttaaccactttaatccgcgcacggttcccgatcatatcggtcccattcttgatggtttcagcacgccggacttcaagccgaacggttgaatagaatttcaatgcgcgaccaccaggtgtgacttcggggttcccgaacatcacgccgactttttcacggatttggttaatgaataacgcaatcgtctttgttttattgattgttcctgataatttccgtaaggcttgtgacatcaagcgggcttgtaacccaacatgcgcgtcacccatttcgccttcgatttcagcacgaggcactaaggctgcgactgaatcgacaactaaaatatcaacagccccacttgaaactaaggcatcggcgatttctaagccttgttccccagtatctggttgtgacaagagtaaatcgtcaatattaaccccgagggcagttgcatacttaggatccattgcattttcagcatcgatataagcagcagtcccaccttgcttttgcacttcggcaacagcatgtaaggcaacggttgttttacctgaactttcaggaccataaatttcaacaattcggccacgtggatacccacctacaccgagcgcttcatccaatgcaagggaaccagatgaaacagttgagacttgtgtatcaaccttttcacccattcgcatgattgagcccttaccaaaattcttttcaattttctttaatgcagcatctaaggctgcttgtctttcatctttagccaattaagtgccctcctcaaaagagtccttttcagtactctcttagtttaccgatttcacgaaataaaagcaagtaaaaatcgaacaaacgttctatatattttttaagctactctactatacccgaatcaccgcgtttttttcgtgctttttgggttaaaaaaactggcgtgggattccccgccagtttaagtttatttagaaaatgagtctttaaagacgcctctgttcttgatgaaataatcggtacccgaataaactgtaaagaacaagcaaacgtataacatgatctgtgccattggaatgccgatattgttaaagaagacgttgttgagtagcaatagaataatcgctaacatctgcgtcgtcgtcttaatcttacctggcatagctgcggccatcacttcgccaccttcgcttaataataaacgtaggccagtaacggctaattcacgccaaataataatcgcaaccacccatgctggcgcttgatctagcgccactaagaagataaatgctgtcatcactaataatttatcagccaatggatcagcaaacttaccgaagttggtcaccaaatgttgtgatcgggcaatcttgccgtctagtaagtccgtcaaagaggctacaatgaaaatcactgttgcaataatcgcactgactggaatacttgtcccagcgaccataatggctgtcgcaggcacatccaatactaaaatcaaagtaaaaatcggaatcaaaataatccgaaacatcgttaatttatttggtaaattcatgttgaagactccttaatgtcctttatttagccaatgttgctgtgaaattaatcgtccgcacaaacgttgcttcgttatttggactaaggttaatatcggtgccattaatcttcatcttcgttgcaggtgcattcccagtttgaatactaaattgcgtaacgccttcaggtaattcagcagtttgttcggcaccaactgcgacagaaccttgccaaatttgttggccattggccgttaagctgacccaagcagctgatttatcagctgagaacgtaatttggttggctttagctggcaagttcttaatttcaaaagcttgttgtgacccattaatgctggtcatcttcgccgttaattcttgcttcttagccttatcttcagcagctttcttgctagcttcttgtgccttactttcagaagcggctttcttactgctttcagcagacttgtcttcactactgctatccttcttaggatctggtttatccccagaaaccgtaaccgatgagcttgtttcgtttaacgtttcgcggtctttaccacggttgctgagcgcaatcccatagaccaccccaataatgatgaccacaattgccacaatcgtaatttgtgggacaaggttgcgccatttcgaccatttagaatctgttgtttcgcgcgtcaatcgggtttgattttcaacggatttttcaacatattcttctggtttcgtatctggtacagcatcttggtattctgccaacaatgcatcattatctaagcccactgtttgggcgtattgcttgataaatgcccgcacgtaaaaactgccaggcaaggcatcaaaattgccctcttcaatggcgattaaatatcgtttttggatttttgtgatttgttgtaaatcatcgagtgtgtagcccttttcaattcgtgcttcacgtaatttttgaccaatttcattcataatcaattccacccactattatcccagtatcattatccataattatagcatattggtacgtatgtgcattattaagatttctttattttaaccaaccaccattaacgtacaatgtctgtcccgtcatataatcggctgcaggtgccattaaactcaatacccaataggcaatctgtgctggggttgcaaaagcaccggccgggatctccgctacaacagcagcccgttctgctgttgtgaactgattgttcattttcgtatcaactgcgcctggtgcaaccacattaattgtgattccaagcgatgccacttcctgtgcataggcgttcacaaaggcggattgtgcgcctttaactgtactatatggcacttccattgcactgccccggccaccatagattgaaccaattaaaacgacgcgtcctaatggactttgcgctagtttcgcttgcagctgctgcatcaatagcattggtgctttaacgtgcacctgccataagtgatcgagtgccgttgcactgacctctggcaataagccatacgtcgtcgcacctgctgtataaatgaccgcatcgacttgaaaaagctggcctgtcaattttgcaacagcgtcctcttgggttaaatcagcttgaagcgcaaaaaaatcctgttttgggtagtcttgcaacaattgcttttgcagcgtcgtaacccgcgtctgattttgatgatagtgtaaataaagcgaccaaccgtccgccgccatttcagtcgcaaccgtcatcccaatatcaccggatgcaccgataattaaggctgatttaggcatggtttgctccctccggtaagatgtggcagactgtcatcgtttcaattttgaaataatcggttgccatctgttgcaagtccgctaaagtcacttgttcgatcaaacctaagacatcaaatggactgatttcggtaaagaattcatcactatattggttcgcaatggcttctagcgaattgaacgcttgcaagtattcaccaattgcggctcttttaaccaacgccaagttatcctctgaaaagtcaggactttccgtggcatgttctaagatattaataatcgcatccgataattcttgggcattgtccgcatcgccaccaagggtcacaaaattaaatgaccgttgaatggcaaattcgtaaccaaaactatcatcaagtgtgccatcatcgtacaacttttgcacttgcgttgatgaatcaccaaatagcaattcaagtaacaagttcatcttcaactttgtttcaagtgctaactcacctgttccgtaatccgttaaacctttaatcccgaccatgctcttgctacgcgtaattggcatttcaagtgaccgatacggaatgatatcatgaccatcttcagcttcttcaggcaatgaacgtacaatttctgttggttgggcaaatgttttttccgcttgattggcgttcaaccaatcaaccacttcatccggatcatcaatttgcccaacgataaagaggttcatattactaggctgatagaacgttgcatgtgcttgatagagcgcttccggtgtaatttgcgcaatactatccaccgtcccagcaatgtccgtccgcactggatgactcggatagagattgccaatcactgtatagaataagcgccaatccggttcatcattatacatctggatttcttggccaatgatgcccttttctttttcgaccgtctcagttgaaaaataaggttcctgcacaaaatcaagtagaatatccaaattttctcgcaagtgactggttgttgaaaataaataactcgttcgcgtaaaactcgtaaacgcatttgagcttgccccgtagcgaccaaacttttcaaacgcatcgtaatcttttttctcaaataatttatgttccagaaaatgcgcaatcccgtctggcactgtcacataatccgtttccccagctgggataaacgtcttatcgattgaaccataattcgtcgttaagattgcatatgtcttatgataaccgctcttagggtatattttaacggtcaagccattctctaattcagtttcatagagggtttcacctaagcggggattttgtctaagcttcatctgtatcgacccctttcaggaagtaaatggcttgcaattgcatctttgcggcttgttcttgaaccgcttgtttagaaaccgccaagatggcttgtgtaaatcgctctgcatcaatttcagtttcaggtacaaacaaacgattgaattgttgttgccccaaataggccgcactatcgagactcgatttaaattgattaatcaaggccaacttcgtttgttcaaagaccgcctgttcaaagtcacccgcgataatccgttgacgttgggcttcgataatctctaagacgcgatctttttggcgactttcaatcccagtctgtaccgtaatgacaccccgaaaagcatcgattgcacttgaggcatagtaggctaaactcgctttttcacgcacattggtaaaaagtaacgacagcggtgtgccaccgaataaggcgttcatcaccattgtggcataataatcagcttgatagaagtaagctggcatttgataggccatgtttaacttgccttgttgcaccgtttgtacttctgttttagtttgcacttgtggatataacgattgttgataaaaaatcgttggcagttcaacattacgcggtgcaaatggcaattgtgccaaatccgcgaccgttttggcttcgtcgatattaccgacaaacgtcatttggacccgatcgtttgcaatcatcgattgataatacgcatatagttcatccggtatgatggttgctaaatcagctgcatccccataattgggaatttgttgcgttgcatctttaaaatagagtttgcgtaattcaaccgccgcatatgattgcttatcatccgcaacactttcgatataccgcactaagttctctttttcacggttaaaaatgaccggattgaactggccatcaaccacatctggatgcaataataattgcccgataaacgcaatcgcttgctcttgcaagtcgattgtatcccgtagatattgggggctcacaattcgcattgagatgctaaaaatcgccaagtttccttgtcgataggcattcatattaaagccggcaccatacatggcttgtaattcattcgcaattgcgacctggtcacgataggcttggctactagcacctagaacgctcgctaataatgagcgccgggtcatcccatcagctgtgacgggggcaattaattgaacggtcaatctaattgttttaaattggttagtttgtaaaatattcaggtagacgccatccgttattttctgattcacgttatattactcctcactgtttcaacagttaaaatggctcttttcaacttatcctttttcatagcacggattctatcataccaaaaaaagaaggtgaactcaaaaaaggcagcgacaaaagtattttttgtcgcggcctttttcatttaatagtttaaccgagttccatcagccagcgcctttcagttaatcctgaatgtcaatcaatcgctgacgcgcttattcgccattttaggcgatattcgacttatgtcacacgctattgttctgttggttcttctggtacgttttgtaataacaccttgcgtggcttactaccttctgatggcccaatcacaccacggctttccatctcatcaaccaagcgtgcagcccggttatagccgactctaaaacggcgttggagcattgatacactagcggtttgttgtttaacgaccaattcgactgcctcttggtaatattcatcttctggttcttcagttgattgcttttcctgctcagtggttggaatcatttcttcgtcgtattcagccgtttgttgtgctttaataaacgacacgatactttcgacatcctgactcgaaatgaaggcgccttgcacccgtaatggtttgctcatcccgattggcatgtaaagcatatcaccacggccaagcagtttttccgcgccactgccatctaagatggtccgtgaatcaatcccactggatacagcaaacgcaatccgcgatggaatattggccttaatcaacccagtaataacatcgacagatgggcgttgggtagcgacaatcatgtgaatccccgccgcccgagccatttgtgccaaacgaataatcgcactttcgacttcgttgctggcaaccatcatcaaatcagataattcgtccacgatgacaacgatataaggcagtggtgcgcctttaatttcgccgtcttcgttgtggccttgaatatactgattatattcaatcatattccgctgacctgtatcggcaaataattgataacgtcgttccatttcttttacaaccttgttcaaagcgttagccgcctttttggcattcgtcacgacaggaatcaatagatgtggcaccccattatagacgtttaattcgaccatcttcggatcgattaacatcaatttaacttcgtgtggtttggcactcattaaaatacttgtgataatcccgttaattgcaacggacttcccactcccggttgaaccggcgattaataaatgcggcatcttggctaaatccgacataatgaccttacccgaaatatctttacctaacggcacagcgagtggtttgcctggatgtgggggttcttgttcaatcatttctctaaaggaaacggtcgaaacggtcgtgttcggcacttcaatcccgacatacggtttacccggaattggtgcttcaatccgaatatccttcgccgctaatgcaagcgccaaatcatccgctaagttaacaattttagagaccttcaccccaactgccggttgaatctcgtacttcgttacggctggtcccagactagcactcttaaccgtcacatcaacaccaaacgaatcaaatgtttgtttcaagacctgttgatttttctcgatagctttatattccgcactctgatcagacgccggaatttgcgttaataatgctggtgttggcaattcgtaatcatcatccgtctcgttcagtggtgcgagttctgccacatctggaacatgctcatcttcgtcagccaccggttcgggtgcagttggttctgcttgcgtcgcaattggttttggtagatccttgggaccgtttattttaaaaggttccaatttttgcttcggtgcattttctggaccatccgttgcgaccatttgctctttagtctctgacgtctcttctgcttgttcagttgcattttgaacagctttttgcgtctgttcttttaaagcactgacttgcgctttacctttttcagagaccttttggaaccctaatttcgtgtagccaccaactttaaagagcccatgcacaaaccgttgtgtactctgaacaacgacgctgaatggaatatctaagaaaacaaaaacgccgataatcacaattaagacggcaatcagataagtccccatctgcgcgaacaagaagtggaaaacaccatacaacgcggcgccaattaagcccccgccaacttccgtcgtaacggccatcttctggaagtcttccaataaaagctgccatgtggcggccaagaaatggttattgaccgcttgatggtgcaagacgaatgctgacaaccaaattaaaatcccgagatacgcgattgcaaatccaagcgtcttttggtgccataaggggggctgcttgccataaatcaacaaatagacccccaaaagggcgaataaaatagcactaataatgaatgtatcgccaacaaacagacggaatacgttagcgcaaagcccgccgataaagcccagctttaaacccgcaaataaactaattaaaataaaaataaacccgatgatgttaactgtgaaatcagtttgttgttttttctttttgcgtgctgctggttttctttttttacttttagtggccatgaaaatctccttcaaccttaaatcctactatccattatacacgaacatctgtactactaaacccataaatgtcagtcccgtaccgtttttaatcacggtactaaaaaaggccacggcaaaattgccgcaacctttcgctgattagtcttcgttggcttgcgctgtaaattggagttgaacgccccgatttaaagcaaccgccgtcacttgatacgtcaatgtttcgatgtattcaatcaatggtcgtgaaagcttcatcatgtctttttgatcaatttcacttggttcaccaaagaaatctaagagttgaaccacttgtgaaatttgacctgacactgcaaagccactcttttctggtgcaacttggaaaggcgtcacaatttggtaaatattccccgcgctcaaatcagcttcttgtaaatatggatcttcttcgctgatggtgactaagctgacttggatattttgttgtggttctacatcatgtgaaacacggtcataatgaaaagcatcaacagtaattggatctttcttcgtttgcatcaaaaacactccctattttaatttatcattgtcgtacaaatgactcttttcgagtcctggaaaatcttgttggcgcaatgcctcaaagatcactaatgccgcacagttcgagaggtttaatgctcgaatatggtcggacattgggattcgtaaacactgatcttcattttcacgcatgaaagtttcaggtaatccggtcgtttccttaccaaacataaaataatgatcaacacttgtatccgacacatcttgatcagaataagcttgcttagcaaacttcgtaatcaagtataaatattgacgatcgggcacagttgctaaaaaggcatccaagttcttgtgataattaatcttaacttggtcccagtaatcaagaccagcccgttttaaatgtttatcatcggtttcaaagcctaatggttcgattaaatctaaaacagtatctgttcctgcacatgtccgcgcaatattaccggtattggcaggaatcagtggttcgtataatacaatatgattagtcacggtctaaacttccttaaaaaagattcagtagattaattatacaatagaattcacaaaagctctaccttgctttgcaaataaaaaaacgtagtccctcggttattcacggcgagaaactacgttagtgtcatttcatcactagcttttatcaaaataaattctgataaaagttagggaaaaaattccttaaaaacattatagcgcccttattttagagttgcaatcagatttttaaactttctttaaattctcatcattttcccactaaaatcgtgacatctaatgaaatttcaggtagcgcttctaacgtgattgccgctaattgtgccttagaagccgtccacgtcaatggcgtcatttcgaccaaatcgcgcaatgtctcgggtgttaacgtcattgttttttgaacttgcatttcttgataatctggaaaatgttgcgcaaacaattctaagaccggaccatgatcatagctttccttagcttgaccatgatacagtaactcccgtaactcatgtaagtaacccgcattgggaatcaccttaattagttgaccgcccggtttcaagacacgtttaaattcttgatattgcgaaggcgaaaagatattgagcaccgtatctaactggtgattagcaaatggcatccgcgctaagtctgctgcacaaaaccacgcatcggcattgtaatcacttgccaattgaatcgcaggtttagaaatatcaaacccgatataacgcgcggaaacttgcgcattgagctgttgcactggcgttccttcaccacaaccgacatcaaggactaaactatcgggggtaatccgtgatgcaatttcttttaagaacggctgaaagaaccctgcttgtaaaaaagcccggcgatgttgcaacatttccttggtatattcagacttcatttgctttgctaaaaaatataacgtgccatttttagcgaggtcaaaactatgcccattgacacaaagtaattggtgctcggctacacttgcaaatacgtcctgacagattggacattgtaatacggccaagttcgtcgttaaaaactgcttggctaactcaatttttttcaaatttctgattctccttgatttaacgtgctttcaaaagcatcccgttccggttagctacattagccaaacaatcggctacgccgcttattcgtctaattaggctaatcctcaaaggatacccggtttgaacgcacttcttttataccgcactttacattcttaaaatatccagtagacttaacagtaagttattgatgaaggaagtgacaccatgctcgaaacctatcgcttcgacagtgctaagaaaaagctcaccaaacatgctaaaatccagtccaacagttggattaacgtaactgatccctcgactgaagaaattgagcttctcactaagaagctccacatcccatctgattttatctactatagtttagatgctgatgaaagtgcgcgtgctgagcacgatcctgattataatgcgaccctgattattttcaacataccaattcttgaaaaagacccgcaaaaaccagataaatacctctataaaacaagtcccttaggaattattgtaacagattcgaccgtcttaaccatcaacaaaacgccagtcacctttttacagagctttgttgatggccaaattaaaggtttcaatccacaaaatcaccgtagaagtgtcctccagattctcttccgcatttcatccatctatctccaatatttgcgggacatcaaccgctctcgtgaacaaatcgaaactcgcttgcagagttccctacagaatgaagaactcttcgatctgatgaccattcaacgcggcttagtttatttcatgatgtccttaaagaccgataaaatggtactcgctagtttaatgcggaccaatatgttagatcttaatgaagatgaaattgaattgcttgatgatattcagattgaaaatcaacaagccatcgaaatggcagaaatttccaacacaattattaacgaaacagccgatacttactcgtcaattattaataataacatgaatagtgttatgaagttcttggcatcttattcaattattctcaccatccccggattagtatttagtttttacgggatgaacgtggaccttccactgtctcgctccaaaacaagttggttgattactttattcatttccctgatcatttctggtgtgctagtctatcgcttctggcgcaagcggtacattaaatagagcgtgtgccagctcctgcggattagaactcgtttaacttacaaaaggccactatcatcaaacacattctcccattctttgggttcgaatgtgttttttatttgactttcataaaaaagctcgttattatacgttatgcacggataaattccgtgttacccaaaataaatgttcgtttttaaggagaattcccaatggacgtatttgattacgaagatgttcaactgattcccaataaatgtattgtgaaaagtcggagcgagattgatactagcgtccgctttggctcagaaacgtttaaaatcccagtcgtccctgctaacatgcagacgattattgatgaaccgcttgccatctggcttgccgaaaaccattacttctacgtcatgcatcgatttcagcctgaaaagcgtcccgcattcatcaagatgatgcacgagcgcggcttatttgcctcaatcagtgtcggggttaaagacgatgaattcgactttattaatcaactcgcaaccgataacttactaccagaatacattacaatcgatatcgcccacggccactcacaagtcgtgatcgatatgattcaacatatcaaaaaagtactgcctaagagtttcgtcattgccggcaatgttggtacccctgaagccgttcgcgatttggaacgcgcaggtgcagacgcaaccaaagtcgggattggccctggtaaagtttgcatcaccaaaatcaagaccggctttgggactggtggttggcaactggcagccctcagatggtgcgcgaaagctgctaccaagccgatgattgccgatgggggaattcgaaccaacggtgacatcgctaaatcaatccgttttggcgctagcatggtgatgattgggtccctctttgcaggacacgctgaatcacctggcaaattagtcgaagaagatggtcaacaattcaaagaatatttcgggtcagcttcagaattccaaaaaggcacacaccaaaacgtcgagggtaaacgcattttagtgccttataaaggtgcgattagtgacacgctcaccgaaatgcgccaagacttacaatcatcgatttcttatgctggtggtaaacgcttatcatcattgaagaaagtcgattacgttcttgttcgccattcaatttttaatggtgacatgctttaaaaagcagttaaaagagccagactaccttttaaatcggtagtttggctctttttagttaggtacctaaaaacttctctgaaatggttgaatccgacttgaaacaactgtataattacccgtgtcgcttttaaccttagcgtctacattgatcagaaaagggtgtgaaacaaatggatattaaacatacacttggagataacagtgttatctttcgtgatgcaacatacattagaagaacggtgtttgtccgagaacaaaatatgccggaaacccaggaaatcgatgcgcacgaagatcacacgattcactatgtaggttacctcaatcaagacccagcagtaaccgcacgcgtgcacgtcttaaaagacggtggatttagaattcagcgcgttgctaccatcaaagctttccgtggccaaggactcggctatcaattaatcgaagccatcattgaagacgctaaacgcaccacaacgccttatattattttattcgcacaggaccacgccattggtttctacgaaaaattaggctttattgtcacaagcgaaggcgaaatggaagcgggcatcccccaccactacatgaaattaacgctctaaaaaccaaaaaacgcacgatccgcatttattacggatcgtgcgttttttattgctcgtataagcctgaaactgacttgaaccattcaaaaaggtgactaattaatatcttgataatcgcatatactggaataccgagaatcacaccggcaaggccgaataactttcctgaagccagcaacacaatgattgtcgtgaccggatacattgccatcttgctccccaagaccaatggggaaactaaacgaccttccaaggtctgttcaacagcaaacacgatgagtactttaatcaataataacggcgagataaacgctgcaataatcactgacgggaccatcgctaggaaagagcctaaatacggaattaagtttaaaatccccgctaaaattcccaacgtcaacccgtacttcatcccaacaatccagtagcctacagtaaacatgactgcaacccaaaacgctactgtcaattggccgcggatgtactgactgacctgtgtgttaatttcttccaacactttcccagttgtggcgcgtactttaaccgggaagaattttaacaaatagcctttcattcggtgaccatcttttaacatgaagaataaaatgaacggcatcgttacaatcgcgatgactacgttcgtcaccactccgaccgctgttccaatatgactaacggtcgaagtcagcattttatttactttacttgataaattactaaacacatccgtattgatatcgtttaattgtttttgaatcgatttgaaggctgggtcgttaaaccatttcatcgtctgagtttgaatattcgcccaataagacggccactgatcaattaaactcgttgtctgggattgaatgattggaataatcgtcgcaattccccagaccagtaagccaacaattaaaataaaaataatcgtaatcgacaatacccgatttaaatgccaacgccgttcaaaccaatcaattaacgggttggtcaagtaatacaagacggccgcaataataatcggtaacccgataatcaacatcaacgactgaattggttttaacagccaagcaagttttgttaataaaagtataatcagcaacgttaataacacgtttaacaaaacaatcggtagcttcttatttaaaaaccatttaaagaaccatgaacgttctatttgtggctgtttattctctgtcacaccaattcacctaattcctacatagtttcttgatacgttatctgcgttcctactttgaattcaggaacagccggaacaccggcggcagctggcgttaaataaagcccactttgcagttgatcttcttgtggcgcaggtccaaaaactaaagcgacatgtccaatactgttgaggttaggatttaccaacgcgcccacatacgtaatcgtataaggttgttgattaataataaccgtagaatctgtcgtcagtgttagctgttttttggccgcttcgtccataaaatgttgaatcaatgccacgttttgaatggcagttgtcgcatgttcatcgaataaaatgaccatcggttcttgatcatcaatggcgtcgttgccaattgaaatgacttctgcttgcgtgttcataatgaaatctcctcttagttaagatagtatcattgtagcatattcgcgacttagttttagcgactagtgaatccttttagtaacaaattaaaccgttttcgcaggaatatgctatactcaaagagtatttgacgaagggagtctgattatgacagaagaagttttaattggtggttatacccgccggattggtaaaggaatctaccgcggaattttcgatgcaacaactgcaaccgtaagtgacattcaaccattcattaatctcgataacgcatcctatttaacgatttcaaaccgcaacatcctctacaccgtcattaaagatggggaccaaggtgggattgctgcctatgacttagctagtggcacccctgtctttttgaacgcggtcttagcagccggcgcaccaccagcatacgtggcagtcgatgaagaccgccaactcgtttatgcagccaattaccataaaggcgaaatactcgtttatcaaatccaagccgatggcagtttaaccttagcgagcacgacagttcatgaaggccacggtccgcgtcctgaacaagctagcgcccacgtacattataccgacctaacacctgaccaccgcttagtggtctgtgatttgggcaccgatgaattagtaacttatgccgtcgacaatgctggtcaattaaccaaagtagcaatttacaagagtgaacctggttttggcacacggcatttaatcttccatcccaatcacaagacagcttacctattgggtgaattgtccagtgaagtgacggtcttagattatcatgcagccgatgggacttttagcgcggttgctacctactcaatgttacctgcagattggcacgaagcaaacggcggcgctgcaatccgtgtttccaaagacggtcgtttcctttatgcttccaaccgtgggtataattcaatcgttgtgtatgccatcagtgatgacagtcgccaactacgagcaatccaacaaatgtcaacggatggtgaattcccccgtgacttcaatctttccgctaacgacgattttctattagccgttaaccaaaatagtgataatggtacgctttatcggcgcgatgcccaaactggtttattaaccgcctgtcaaaaagacttaaaaacacctgaaggcgtctgtgtcttattccattaaaataaaaaagattgaccgtattggtcaatcttttttatttacttcttttacgatccattaaattaataataattgcaatggcaattaacacaattgacgcaaaataaatgaagtgtaaaccattgtatagaatatggcgtaatgttggtaataattgtttaggtaagttcaaagcagtttctggattaatcaattcatttaacatgttttgatctaatcgaccatcaccagcaatcccttttgccaattgccgattcaaaataatcccataaactgaaaccatcaaggtttgacctaaagttcgacttaacgtattaaacgacgttgcaacaccaactttgtcagcaccagcaacgctttgtgccgtaacagtcgtcgtggtaatgattaagccaaagccaatccctaaaccaacagcaactaataagaagaaccaaaacggtgtggtttgtgggaccaatgctaagatgaagctcccaacaagtaaaatacacaaactaccggctagaattgttcgtggtgcgtgcttaacaagtaataggcctgcccataatgaggcaaaaatccacatcacagaactaggcgtcacaacaaagccccccatcgaggctttcaatccgaggatcccttgcatccacattggcatatagacttcaaaaccaattaagaaaccactcactaaagcagccactgcattttggacaacaaatgttcgatttttaaataatgataatgagataatcggatcttgtgcatgtttttcaacgcggataaagaggtaaaaagcaaccactgcaatcacgagcattgaccctaaaacgagcactgacggtttggcttcacccatgacttggaagccatatagtaaactcaaaagggccgccatcaaccataaactgccccaatagtcgactggttcagcactcgtcttcttctcttcttgaaggaagtaccagattaaaccaatcgtaataatcccaatcggtacattgatgaagaaaatccaatgccaggtcaacttatcaacaatgaagccccctaaaagcggcgcaatgatggaggcaatcccccatgctgacccattaaaacccaagactttcgcccgtttttcaatcggataaatatcagcaataatcgtaaatgataccggcataatcgccccggctcccaagccttgaattgcccgggaaataattaacgtccccatatgatttgacaatccacataaggatgatccgatgacaaacaaggccaaaccaaagatgaagattggtttacgcccaatccgatctgccatcttaccatagattggcgtcatcatcgcattcgttaataggtagattgaaaagacccagttcatcaatttcataccgtgtaaattactaatgatggttggcattgccgttgaaacaatcgtcccttcaatggctgtcatgaaagttgcgacgaaaatcgcaatcgtcacgagtaatacattcgtttttcttcccttactttgttccattcttagctccctctcttattcttgggcataaaaagagccttttcttaactcaaataagctaaggaaaggccgcctcttttactcgtctaataatacattaggcatttagtttagcaatacttgcctttaaggcatccactttatctaaacgttcccatggaaattcgacatctgtacgcccaaagtgcccatatgcagctgtttgcttgtatataggtctttgtagatctaacatttgaataatccctgctggtcgtaaatcaaagttttcacgaattgcagtttgaatcttttcttcactgacggtccctgtttcgaaagtatttattgaaacagaaacgggttgcgctacaccaattgcataggccaattgcacttcacacttgcgcgctaacccagccgctacaatgtttttagcaatgtaacgggctgcataacttgctgaacggtcaaccttagtagcatctttccctgagaaagcaccgccaccatgacgtgcataaccgccgtaagtatcaacaatgatcttacgaccagttaaacctgaatcgccttgtggtccaccgatgacaaaccgaccagttggattaatgaaatacttggtttgatcatccaagtatttggctggaataacggtttgaatcgcttgttcaagcatatccttttgaatggtttctaaagtcacatctgcatcgtgttgggtactgataacgacggtatcgacacgaacaggttgttcgttttcgtcgtattcaacagtgacttgcgccttagcatctggtcttagataagcgagttgcccgctctttcttaactcagcgactttgcgcattaaacggtgtgaaagggcaattggtaacggcattagttctggtgtctgatcgacagcaaacccaaacattaacccttgatcccccgcaccaatcttatcaagtggatcttcatcctttgcacgagattcaactgaatcgtcgaccccttgtgcaatatcaggtgattgttcatcaagtgcaacaatcacagcacagttatcgccatcaaagccataatgcccatcacgataaccaatccctttaatagtctctctgaccactttttggatatcaacgtatgccgttgttgaaatttcgccgacaactaggactaacccagttgtaacggttgtttcacaagcaactcgtgcttgtggatcttgtgctaacatcgcatctaagatggcatcactaatttgatccgcaatcttatctggatggccttcagaaacggattccgaagtaaataaatgtctttcttgcatttctatgtttccccctatatatgtgtcggttacaaggcctcttcacggtgtgtgaatcctatcgggaacttcttataactctactatcctagcacaaaatacaatccatttcaaaagccgttgaccttcttttcaaaaaaagttaagatgagacacatattctaagaaagaagtgttgctattgttctaccttaaccaacaacatctaaaggcttcaactcagccacaattactgactttgtttaattatttaaatctcggtttaatcgtcgggctgacaatgtggtcttttccaaagcaattcgggctttcattttatctaactgcgattctaggggcgctattagccattttactcgtcttatcaccccggtataaaccaaagcgaataattgcaactgctgcccttttagtcgcaattattctagccgcaatcatcggctggcgtgatctacctttgattgggcttctatcagggattactagcatttttgttctaatcccttttatctacccagaccagttcaaagaccgtacgttacggttatcatttcaattcttactagccccatttttctttttaattactcagattttcagtggcattcactttatccccgaggatttactcgtaaaattaggcctattcttaatcatcatttatcttctcgaactaacgactcacaatcggatgattactatcctcagttatgtagtatgggcgtgcattattattgcagtgattttaacgcatttaattcacggttggcatttaattctctttgcaggtggccagttattattaattgcgttacaactcggcctaatcaaacgtaactgctatttacaagagtttggatacttgctattaatcactggcgtctttaattaaaatgattaaacaacaaaaaagcgtaagcaataaattgcttacgctttttttaagacggtcacaacgggactcgaacccgtgatctcctgcgtgacaggcaggcgtcctaaccagctagaccatgcgaccgaatggaggttacagggctcgaacctgtgaccctctgcttgtaaggcagacgctctcccaactgagctaaacctccaaaaaaatgacccgtacgggatttgaacccatgataccgccgtgaaagggcggtgtcttaaccacttgaccaacgggccatgtcatttattatttaacggagagtgagggattcgaaccctcgaaacaggttagacccatttacatgatttccaatcatgctccttcggccgctcggacaactctccaaataattgactccggttgtcaggctcgaactgacgacatcatgattaacagtcatgcgctctaccaactgagctaaaccggaatgaaaaagcgcggcaacgtcctatcctcgcaggtagtttcccaccaactactatcggcgctaagaagcttaacttctgtgttcgacatgggaacaggtgtatccttcttgctatcgccaccacactattttgtgcttgcgcactgagaagaacttcgttctctcaaaactgcataataagtaatatttcatttcaaaagcctaacattgcacctttggttaagtcctcgaccgattagtactagtccgctccatacatcgctgtacttccactcctagcctatctacctgatcatctttcaggggtcttacttccataaaggaatgggaaatctcatctcgaggggggcttcacacttagatgctttcagcgtttatcccgtccatacatagctacccagcgatgcgcctggcggcacaactggtacaccagaggtatgtccatcccggtcctctcgtactaaggacagctcctctcaaatttcctgcgcccgcgacggatagggaccgaactgtctcacgacgttctgaacccagctcgcgtaccgctttaatgggcgaacagcccaacccttgggaccgactacagccccaggatgcgatgagccgacatcgaggtgccaaacctccccgtcgatgtggactcttgggggagataagcctgttatccccagggtagcttttatccgttgagcgatggcccttccatacggaaccaccggatcactaagtccgactttcgtccctgctcgatttgtcaatctcacagtcaagctctcttatacctttacactctacgaatgatttccaaccattctgagagaacctttgagcgcctccgttacactttaggaggcgaccgccccagtcaaactgcccacctgacactgtctcccgccacgctaagtggcgcgggttagagtggtcatacagttagggtagtatcccaccaacgcctccatcgaaactagcgttccgatttctacggctcctacctatcctgtacaaactgtacaaacactcaatatcaagctacagtaaagctccatggggtctttccgtcctgtcgcgggtaacccgcatcttcacgggtattataatttcaccgagtctctcgttgagacagtgcccaaatcattacgcctttcgtgcgggtcggaacttacccgacaaggaatttcgctaccttaggaccgttatagttacggccgccgtttactggggcttcaattctgggcttcgcttacgctaactcatcctcttaaccttccagcaccgggcaggcgtcagcccctatacgtcatctttcgattttgcagagacctgtgtttttgataaacagttgtttgggcctattcactgcggctgacctgacggtcagcaccccttctcccgaagttacggggtcattttgccgagttccttaacgagagttcactcgctcaccttaggatattctcctcgaccacctgtgtcggtttacggtacgggtagtttatttctcactagaagcttttcttggcagtgtaacatcaggaacttcgctacttaatttcgctccccatcacaacttgtccttaaagaatcaagcatttcactcaactcaagacttgttgcttagacacacatttccagtcgtgtgcattccttagcttcctgcgtccctccatcgttcaaacaaaataaactagtacaggaatctcaacctgttggccatcgactacgcctttcggcctcgccttaggtcccgactaaccctgggaggacgagccttccccaggaaaccttagtcatacggtggatcagattctcactgatctttcgctactcatgccggcattctcacttctaagcgctccactagtccttacgatctagcttcatcgcccttagaacgctctcctaccgcggacacttacgtgtccacccacagtttcggtattatgtttagccccggtacattttcggcgcagcggcactcgactagtgagctattacgcactctttaaatggtggctgcttctgagccaacatcctagttgtctgtgcaccgccacatccttttccacttaacataaattttgggaccttaactggtgatctgggctgtttccctttcgactacggatcttatcactcgcagtctgactcccggaactaaatcaatggtattcggagtttatctgaattcagtaacccatgacgggcccctagtccaaacagtgctctacctccatgatccaatattccgaggctagccctaaagctatttcggagagaaccagctatctccaagttcgattggaatttcaccgctacccacacctcatccccgccattttcaactgacgtgggttcggtcctccagtgtgttttaccacaccttcaacctggacatgggtaggtcacttggtttcgggtctacatctatatactcactcgcccatttcagactcgctttcgctacggctccagcttttcactttaacctcgcatataaacgtaactcgccggttcattctacaaaaggcacgccatcactcattaacgagctttgactaattgtaggcacacggtttcaggatctatttcactccccttccggggtgcttttcacctttccctcacggtactggttcactatcggtcactagggagtatttagccttgggagatggtcctcccggattccgacggaatttcacgtgttccgccgtactcaggatccagaacggaggttaagttgtttaatctacgtggttatcacactctttgactcagcttcccagctgattcgattacaacttaacttggtaactccaatgttctgtcctacaaccccaagaagcaagcttcttggtttgggctcttccccgttcgctcgccgctacttagggaatcgatttttctttctcttcctgcaggtacttagatgtttcagttccccgcgtctaccttcattaagctatgtattcacttaatgataatacccgattaaaggtattgggttcccccattcggaaatctccggatcaaagcttacttacagctccccgaagcatatcggtgttagtaccgtccttcatcggctcctagtgccaaggcatccaccgtgcgccctttataacttaacctaactttacctacggtaaagggttattatttgagtttagcgatatgaactaattcatatttctattaaaaaactctttaaaacgcaatgttttctcggcttttaaaactaatatattacttattatccagttttcaaagaacaaagtttgagagtagacctctcaaaactaaacaaagtttcgacttcgcaaatgtacaaggttttccgtattattccttagaaaggaggtgatccagccgcaggttctcctacggctaccttgttacgacttcaccctaatcatctgtcccaccttagacggctggctcccgaaggttacctcaccggctttgggtgttacaaactctcatggtgtgacgggcggtgtgtacaaggcccgggaacgtattcaccgcggcatgctgatccgcgattactagcgattccggcttcatgtaggcgagttgcagcctacaatccgaactgagaatggttttaagagattagctaaacctcgcggtctcgcgactcgttgtaccatccattgtagcacgtgtgtagcccaggtcataaggggcatgatgatttgacgtcgtccccaccttcctccggtttgtcaccggcagtctcactagagtgcccaactaaatgctggcaactagtaataagggttgcgctcgttgcgggacttaacccaacatctcacgacacgagctgacgacaaccatgcaccacctgtcactttgtccccgaagggaaagctctatctctagagtggtcaaaggatgtcaagacctggtaaggttcttcgcgttgcttcgaattaaaccacatgctccaccgcttgtgcgggcccccgtcaattcctttgagtttcaaccttgcggtcgtactccccaggcggagtgcttaatgcgttagctgcggcactgaagggcggaaaccctccaacacctagcactcatcgtttacggcatggactaccagggtatctaatcctgtttgctacccatgctttcgagcctcagcgtcagttacagaccagacagccgccttcgccactggtgttcttccatatatctacgcatttcaccgctacacatggagttccactgtcctcttctgcactcaagtttcccagtttccgatgcacttcttcggttgagccgaaggctttcacatcagacttaagaaaccgcctgcgctcgctttacgcccaataaatccggacaacgcttgccacctacgtattaccgcggctgctggcacgtagttagccgtggctttctggttggataccgtcactacctgatcagttactatcaaatacgttcttctccaacaacagagttttacgatccgaaaaccttcttcactcacgcggcgttgctccatcagactttcgtccattgtggaagattccctactgctgcctcccgtaggagtctgggccgtgtctcagtcccagtgtggccgattaccctctcaggtcggctatgcatcacggtcttggtgagcctttacctcaccaactaactaatgcaccgcgggtccatcctaaagtgatagccgaaaccatctttcaaccttgcaccatgcggtgctaggttttatgcggtattagcatctgtttccaaatgttatcccccactttagggcaggttacccacgtgttactcacccgtccgccactcactcaaatgttatcaatcagaagcaagcttcttcaatctaacgaaagtgcgttcgacttgcatgtattaggcacgccgccagcgttcgtcctgagccaggatcaaactctcgattaaaagtttgtagctcttgttttgttacttaatttatttgctagcgaaattgactttgcaaatatgttttgtgccccgaagggcgaccctacacatttggtttgtcgaaactttgttcagttttcaaagatctactgtgttgaaacagcttaattaatatatcatttctaacgaacactgtcaagcgatttttataaatattttctgaatatttattcaatctcgtttgacccgttatttcgttagcgatgagcttttctctcgctgacaacatagaatactataccaacatctaaatctatcgtcaagtaaaatttgcataaaattcatcttttttctaaatattcaaacaacttagttatttgcaagctttgcttggcattctggacagataccatgcacttccattcggtgcccagttaccataaaccccgttagattctcagcaatcacttctacatcatctaactccggataaaaaacatcaactacttttccacagttctcacaaatagcgtgataatgcttggtctgcgcaaaatcaaaatgactggatgcatctccataagccatttcttcaataatccctaatgaggtaaacagacgcaagttattatagattgtcgcaacactcatattcggaaagcgccctgctagcgccttatagacatcgtctgcagtcggatgcatatgagtgccaatcatgaattccaaaacagcttgccgctgtggcgtgatccgtacgttgtgttctttgagtttccgtaacgtttgttgcacgatgtgactcattttgccaccacctttcgctaatgataatcattatcatatatccttattgctgtaatcgtacctttttttgacgagactgacaagtatctttgctcaaaaaaagacgttacgcgagtcccgtaacgtctttacatactttacttcaattcaggtgcatccgtctcataaaggtccattgttgacttaccattattttgctggataacactcgttttgttgttactgtctttcaacttagctttagcatctttcaccttgtagctaatcttagacttatctggtttttcgaatccttgtggtgtatagaatcgaagtagatcgccggtgattaccttgtcagaaagtgacaattcttccgttacatgttcactgattgccgttaattgcttcttctgcgctgccgttaaattcgtcagcgtcttcccattagtcgtatcgtaataggtgctgcctaccttcgtatactgtggtgtgacaaagtccccatttctaaagacaaccgtctgattgcggttaggcgcaagtaaatccgaaccaaattggatggtatcgtcattttttacacctaataggttcaataaggttggtaaaacgtcaatttcaccaccataggtatggttaacgccaccttttaacccatccatatgcaccatgaacggtactttttggaattgcgcattatcaaaatcagtaaatttatcctgattcaataacttcgcaacagccttcttatggttccctgaaatcccataatgatcgccatatagaacgagcatactattcttatctaagccagtcttttgtaaccaagctaagaattcaccaattgattgatccaaatacttagcggtttgcacataaccatcaactgtatcatcaccagtatcggtcttagcaattgattgattttgtttatccaataagtatggatagtgatttgtcacggtgattaatttagcatagaacggttgtggtaattgttcaatgtattgggctgagtcttgcatgaagatcttatctttcaagccataacccacgttgtagcctttaccttctttaaagtattgagaactgaagaagtaatcatagccccatgacttgtaggtattatcccgattccagaaacttggcacatccccatggaatgaagcggttgtgtaaccttgttgatctagaattgatggtgctgcttggaaggtattggttgtcccttgagtgaccatggcggccccttcaggtaacccgaacaatgagttttcgagcattaattcagcatcagccgtcttaccttgaccaacttggttaaagaaattgtcgaaactgagggtgttttggtcgtgatatagcttattgatatttggtgtgacttcttgaccgtcccacttataatcaattaaaaattgttggaaactctctaaatggataacaaagacgttcttacccttagccacgccagtgtattcaacattgggtgcaacccggttgtccttcatatacttcaagacactactcatactactactatcagcattagccttaatcgcattattcttggtcgtcttcacgccatcatagacagtgtatgcattcatcccaagatacttaatgatgtagttgttatcgaacgtccgggttaataacccagaacgatctgcttctgcaatcccgaggttggcaccgaataacacaacagctaacccagtaattgcaaatgcattccgcttcataaagacacggtgatcaatcttcactaacttagtagccaataagatgattagcaataaaacatcagcgaaaactaggaaatcagaatattcaataatcccagcaatactcttgcccaagttatttgataccgcaccagaacccttcattaagttaaacgttaagaagtctgaaaattcacggtaatacaaaatattcgagaataaccaagttgaggttattaaatcaataataatcaacgtaatgtatgactttcggccattcataaacaaggcaatcccaaatagcaataaggttgttggaatgggattaatcgtcattaagaaggcctgcatgccacctttgacgcctaagttaaattttgtttgatatgcgtaaattgttttaagccagaatagcgcaactgcgaaaaggaagaatccccatcgtgtgcttaatcctgattgaattttatgaccaatttgtttcatcgatacagtagcctccgttaaaggtcgttgggctttaaaagccgttgacaatctgaaagttagtttacacatccgtgaaatgaaaagcaatatgtaaccggcttgaatgccaaatattaaaccatttttaataatctgagtcgcaactgagcaaggctatcacctgcttaagtagcaaaaaaaccatcaagtaattcgatactcaatggttaattaactagtctgctaataaatcgtatagttccattgcaactaaatcaatattgtcaaattggaattgttgatgtgtgttgctgtcttcaagttcaaatgcttgagcttgaggatcatagctaacagttgcttttaaatcgccgtccttttcaaaacgtctttcttgaacctcagcgctttgatcttcttgcattgctaccagacgtttgataatcgcaactaactgtgatgattgcatggcgaagcctcctttaataactaactatcagtttatcagaaaaagagcacttctgcaccgtttatatccaattattttgcagaaggccaccataatttaattaaagcttgggtgccatcgtcgcctaattgtttatcattaacgagctgcgcatagagtttcttagcttgaagcgtagctggtaaatggagccccatcttttcggattccgttaatgcaatctttaaatccttcaaaaaatgttttgcgaaaaagcctggtgtatagtcttgcgctagaatacgtggaccatagtttgcaaggctccagttctgagcactcccaccattaaccgtgtttaaaaccgcttctagttctaatccggctgctttagcatacactaacatctctgtcattccggtcattgtgccagcaatcatgatttgattggccatctttgtatgttggcctgtcccggcagcaccgaagcgatggacagtcttacccattgcttcaaaaaagggtaatgccgtttcataggcagcttgatcgccaccgaccataatcgtcaacgtcccgttttgggcgccgatatcgccaccagaaacaggcgcatctaatgcttgcagacctttgtcagctgctgttttggcaattctctgcgccaatgttggcgtgctggtcgtcatatccaccaaaatctgaccaggttgtgcagcactaaaaattccgtcttcaccataatagatggcttcgacatcttgcggataaccgacgattgataacacaatctgactttgcgcgacaaccgctgctggtgaatcagcccatgttgcaccgagtgccacaactgcatccgctttttgttttgtccggttatacacgacaactggatagtctgccttcaataaattcttgaccatgctactacccatgacacctgttccaatgaagccaattgttggttgcatcaaaaacgcctcctactttttatcagttactcgtggtttaactgctaacgccccaatccccatgaacatcccgagatagtacgtaaacaatcgccagagcaacatgcctaacaccagtttacttgaactcgggataaaagtggcaaataacgtcttaaaactatattctgccccaccagaaccgcctggaactggaaagagcgagacaatcatgacaatcatgatgtgtaagaccatcacctctaaataattaacatgcgggatgccaagtgccaataagacaaagtatggcacactataatagaaaaaaagttgcccaagggttaaaatacagcccttgattagtttctttttctcgcgtttaaggtgtagactctccgcgtaaaaggtatcgattttggccattaacatggtccgccattccgtcacccgtttttgggagacgaaccagcccaccggaattaataaccagtgcactaactgtttcgtaaatcgattgtaatacatgattagcaacaatacggctaacacaaccacatgcacgattaatccgaaagtaatcaaaatcgacagcgtcccaaaatgcttggaaacttgcgagaaaccgatcatcatacttaataagaaattcaccagtaccatgaattggtaaacaataaacttcatcagcagtactgagctagcttgcccagcttctacacgggattgcatcaacgctaccagttgtgccggttgtccacctgaagaaaacggtgtaatcgcattgaatagttgtgcaatcaacggaatccgaagcgcattgtataaagaaaagtgttctgtgcggtcttttagaaagacgcgtaagacaagtgcctcgaaaaaccacgaaattaacatacataataaggcgaccaacagccaccaaagtttcagatgactaatatcgataaacagctgtttcaacgccagcgtgcgactttcataggcaaaaatcccacacccaatcaacagcatgactgcaaaaacaatcttattcgttctactcataaacgaccctttttcttgttattagcaacgatatgaaaaaactgttgattatatgatcaacagttttccgccagcgcgacttattttttagtatctaaatcttctaattccaataaatcatcttggtctaactttaattcgtcatataatagctgtgattgcttatagaaatgaatcatctgttccgcaaagtaatccgccgaaatagcatgcaacttctttcggcgcggtgctggatcatcaaatgcatgtggatgattcaaataattcgatacttgatggatcatttcatcttcgttcgtaaatgtcgtcccaattgaaggatcagttaataactcagccgcatatggacttgtcatgacgacaatcttgagttcagcggccatcgcttcaatataagttaatccttgtgattcagagtcactggcggagacaaaaagattcgccatatgataataatttgcaacttcatcgttatcaaccattccagtgaaaatcacgtggtcggtcatgtttaacttggcaacctgagcttctaaatcttctcgagctggaccttcaccaacaatcactaacattaaatctggtgtttgggcgactagtttgggtaacgcatcaactaagatatcaatccgtttttcataagcaacgcgactcaatgataagagcacaggttgttctggcgtcaagcccaattcggcccgtatgtcgcgggtcacttcgcgctcaaagcgactaatatcgaccccggtcggaataatccggatgggggccttcacttgatagccatttaaggtttgagaaacccgctctgatggtgccacgatgcctgacatgtgatataaaaaggcctttgtcatttgcttaacatggtatggccgtaataacttcccgtttaaaacatagtgtaaataatcctcgtacatcgtatgatacgtatgtaaacaaggaatttttaaatttttagcgacaaacttcccgatgtagcccatcgaaaattcggtctgggtatgcacgatatcgagatccaattccttagccacttgataagcgtgaaataagccgcgcacagcaattcgccgatccgtaaatgagacaaacgggacactagcaaaccggaaaatattcggttcgactgcatctttgtcaacatgtggatcggtcgttgtaaatatgtagaccgaatgcccttgtttttctagggcttcttttaatgttttaatggaggttgccacaccactgacttgtggaaagtaggtgtccgtaaatatcccaatattcaattggtttcctcctccttatctttggacatttgatttcattataataattacatcgcctagatgcaatcaatgtcactaattgtaatctattcatactagcataaaaaccgtctttagacctaaaaaacagccaatttacgttaaaaaacgggcactgcacagtttttgtgcggcgcccgtttttttattttagcgtaaccaatacgtaattgagaagattattaaacaccaaatcggtaatgccactaacaggccgttgcgaatacccataaaaaatttcatcatcccacctcatttcataaaccaatacgaacagcttgctatttagggtcactgtctactatgataaaggtaagtttaggcttcatttattaagaactaccgtgcttttacttaagaatgattaaaggagcaaacgatgcaaacttatctcattaaaaaacctcaaaaactcgaattaacctatgacgaaaatatcctaacaattcactatcccggactgtttaagaagaaacaaaaccaggatcgtgacattccgtttagcaaattaaaatcagtccgcttttttgaagcgacttatcggcatggtcatctccaaattctctaccaaaaacccaaccacgccctcgaaaaaatcgtcatcagtttcgaacccgacgataacctcgctgtgcgcaagttatacacagccttagcggactatctcgaaaaaccaaccgttgaagaagacctcagttatgttaagaccggtgatcttatcatggcttacctcaaaatgcgcgacgacggcctaatgacccacgaagaattcgaagaaaaaaagaaaagaatactaggaatggaatagagtgcgcagtaagcccgtttatcttctgaggattagcttaatcaggcggattgccgacaaagtcggtgatttgactgatgtcgctaaccggaagaagatggcttacggagcacgtttcaaagtagagtgcgacggcagacgattatacgctgaggattagcctaattcaccacaaaaaaaagggccaacgacaaacatgtttgtcgttggccctttttttaatcctcgcgagatactgagctaataaaccactctttatttctttataaaaccaattgccatcccgatgattaagatgaccaacacaataaccgtaatccaaacgtagaggtaatccacttctttagcaaatgcgtagattgataccaccacacgcaagactggcgttaaaatgaggcagaataagcccaacataatcacagcgccagccttaaatgcagcaatgccactgaaaatttcggtaaaggtcgttggaaattgatattctgaataacctgtaccgccatgaataatcgcaagtaacatgccaataatgagcagcgttgctgaaaccgccaccccaatgcgtaaaattttaccgatgacgagttcaatttgagccatctctgcttttttatctatcattaaatatgcaccccgaatcctttaagcaccatttgtaaacctgtgtataacaaaatggggataaaaatcatgcgaatcacacgtggttgcaaatactgcataatccgtgaacccacagtggaacctaccaaaattccgattgctaacggtgcagcaacgctgggaataatcgcaccgctgaagaaataaacagtggccgaagctgctgccgtaacccccatcatcaaattactcgtggcacttgatggtttcaatggcatcttcataatcgtatccatggcggtcactttgaataccccactcccgataccgagcaagccagaagcaatgccggccccgaacatcatggcaaagccgcctggtacttgttcaacagcgtagtcgacttgttcttggttggccttatcgtagtaagtgccatttaagttcaacttcttggcccacttatcttcaccagcgccgacgtgttgttctgcaactttaccacgtaatttttgaatcatgttgtacgttgaaaatagcaagaatgcgccgaataagatgaataagaatccagttggtacgatgccggtcaataacgccccgataatcgccccgacggtcgttgctatttctaggaacatcgccactcgtaagttgagcatatcatctttcaaataggcgatagttgcaccagaacttgttgcaatcacggcaataatgctggccccaatcgcgtatttaatatctaagccaatcgctagcgttaatacgggggttacaatgatcccgccaccaatccctaagattgaacccaacacgccggctaaaacaccgacggcaagtaataaaataatttgttgcatctcttttctcctcttaatgcatttttataaccgtttttcgcctgttagtgcacggagttccgttaaatcctgactgacttctaaacagcctaagtattgtccctgtggatcacgaaccgcaaaatagcgaatatagacgaacatcccgcggaagttcaaccaaaaatcagcatggtcttctcgccccgcatgaaagtccgctaaaattttctcaaccttatccacactctttggtggatggcagttcacaaccgcgcggccaatcactgcccgggttcttgggaaaatacgatgctcgttatctgagaaccactgcacaatatcgttttgatcgacaaaggttaaatcaagcggtagtacttggagaatcgccgtcaattcactaatattcatcgacccagatggtagaacgattttagcttggttatccacgccaatttcgatatggggttgtggtgcttctcgacgtgcttgaacctccgcttttggtgccgcttctttttcgtcagctaacattgccttcacaaaatcaggcatttctggttttccttcatctttttcagcgggggcttttggtacaggttgcccctgaatttcaaacggaatattagtcgctgctgctatcgaagaggggcccggttctggtggcgttgtttgggtcatcatttgcgcatccgccaacgattgcgccatcgcattcagttcttgcgcaatcttcggcacggtccgcttttcggccgccgcgatagcttcagcacttggttgccatggtaatgggtctggaattaaggtatacccgattggttggctttcagaagcaattagtccccagtcagctggtgtaaagacttcattaaccatcggaatcatgatttcttcttctttgaaaatcatttcttgaatttctttgctcatcttttcaacggctgcttcaattgcatatttatccggaattggttccgcagttaccatttgataggccgtcttcaccaacccccgaatttgatcatccacaccccacatcactttgggtggtgcagtaattccatattgatccatcaacggaaaaattaagttttctttccgtaaatagtggcggtcgatcaactgtaaatcttttaacgcttgttgcatccgcacgagataattttgatcagtccctgactgctgccatttcttcaaacatggcagtaattcatcatttaagagcgagttcatgaccaaattttctaatttcatcacagcgactgggtgtcctggctgttcttgttccggcgtttcagccccgtttgaattaatcgcccccttgaaaaccgcagcatggacattacacaaatgttgaatctccatcgggttcaagccactggcaatcaattcccgttcagcagacgtaatttcagacacatcaaccccagagaaggactcatcaaaaatccgcttagcctcttcaaacgagccaccttcatgcagcatttttaagatttccacgattcgtttttggcggtacgcactgctatgctgttgctcacacatcagctaacacctcgaatccttgtgcttctagactagcgataatcgtcgtcaaaggaatttgcttcatcttagcccctttaggcaatgtcataaaacgccccgcagtattcaaaagcgctgggttcgtgaccccatcaagtccgatttcaacaagcactggcaccacttcaggataggccgttaccaattcataaacggtttgacttaatttaatttgttttgccatcataatctccttagtcagcgttatttttcaatccagccaccatcaattggaacgacggtaccatgaatgtaatccgcaacctcactcgccaagtaaacacttaagttcgcaacttcagttggttgcgcccaacgccccgctggtgtctgacgggcaacttcttgtgccatctcaccagtccccgcaaaatcggctgcgttcatcggcgtctcaatcgcacctggggcgatacagttggcgcgaatccctttagcggcgtaatcataatcaagctgctttgtatagccaatgatggcgtgtttcgatgccgtataagccgcaccaccgccaccagcaactagcccagcaatcgaagccatattaacgaataccccacgcttttgcgcaaccattgttggcaagatcgcatttgttacaagatattgactttttaaattcgttgccataattcgatcccaatccgcactactggtatcaagcgttggtgcataagcatccaacacgcctgccgtgttgcagaccacatcgattgggccatgttctgccagcaaagtcgctaatgtcattgttaattgcgtttcatcacaaacatcaacctgcgctgtgatgcaccgactatcaacagggacttcaatcggctggcgatcaagtgctaacaccaatgccccctctgctaaaaaagcggccacttgagcgcgcccaattcccgatgccgccccggtaattaaaatggttttagtcgctaaatctgcaaaatgccccattagtcgaccaattgccaatcatcagccaatacatcacacgatgttggttggaacattgagtatgctggtgtttcggttgttttaattaataggtagggactaattgcttgcccctcgaatgtcccatcggccacttggaaaataaataattctggaccatcccagccagtccgtactacttttttgccagccttaattgcattaatcgcttcatcaaatcccatgatcattacctcatttaacttaattttttaaaatgttgaacaatcaaccttatatgatattctagcacgccactcaaatcggtaccaattaaaatcacaggcaattcgattcaaaaaaggtgtgaccaatattggtcacaccttcctgaagttaatttgatttgcgtttaaacacacgcttaatcacatcccagacccctagtgattgaactaagcgttctgcgggcacatactcgcgaatggcgcggagcacttttttgggttcctttgaagcaaaagtatacgtcccatttttctttgtttggatagcatagcggggaatccacttgcctttgaacatgactgatgcaatcacatagtcaacttcttcccatggaatttgaataaattgtcgtgcgtcacgatcattgaaaaattcaaaccctctatccccgatcatgatttgtccataatcagagagtgctgtaaacgacgtggctttaatcactaagtccacctttgtattaatcgattgaaccataatatcgactccatttccaaaaacttactttcattatacgcttttataaaaaggaggggctaggacaaattgactttgtcctagcccctcctttgttttctaaacgtgcttcagtaggcatattcctgcggttaaccaaatttgccaaatcaccgactttgttggtaattcgcctgattaggctaatcctcagaagatacccagcttattgcgcactcttttacattaagtgtaatagatggaagacaattccgactacgaataagccaagaataatcacgattggtgagactttcttcttaagtaaccacatacagaataatgttaatcctaatgcagctaacccaggaatcaagctgtccaagttgtcttgcaacgttgtcactttatggcttgtcaatgacaaaccttgagcttgttgttgtaaggctgattggatacccttagcaccgctaggtaatttatcccagtcgatgaatgcgcctttgtccaacttaacagatgaaacaactggcgtaaacttgacagatacccaacggttaaccaacgaccctaagatgaacatcccaaggattgaagcaccctttgtgatgtcttgcaaaataccaccagataaatcttctgtaatctttgaaccagcacggtagccgaattcttgtgtataccacatgaatgacatccggatagcattccaagcgataaagtaaatgattgggccaagaatgttaccactcatagcaagtgaagcagccaaagcaccgatgattggtttaacagtgaaccagaatacgggatcgccgataccagccaaaggtcccatcatcccaactttaaccccttgaattgtaacatcatcaattggtgcaccattagcacgttcttcttcaagtgccaaagttaccccgatgattggtgaagcaacataaggatgagtattaaagaattccatgtgacgaactaaagcagctgcccggtcttcttttgttttgtataatttcttaattgctgggattaatgagtaagcccaaccaccattttgcatacgttcgtagttccaagaaccttgaaggaaagttgaacgtagccaaacagaaatacgatctttacgcgttaattttaattgttctgccataattgttagcctccttcttagtagttgtcgataatatcgccaagtgggtcaccagtatttgaaccgccgccattacctgagccgccttgttttgaaagggctaagtataatagggcaagtgaaacaccgattgcaccaaggccgataagtgtcaattgtgagatagtagcaagtacgaaaccaattgcgaagaatggccatacttctttagttgccatcatgttgataaccattgcgtaaccaacggcaacgaccatcccaccaccgattgctaaaccgtctgttaaccagattggcattgctgtcaacatttctttaacagggccagcaccgattgctaagattaagcctgcaggaatagcgattcgtaaaccttgcatgataatagcgatatattgccacatttcgatcttacggaagttaccttctttagcagcagcatccatgatgtgcacgataccagttgctaatgtccgtacgatgattgttaataataacccggctacggcaagaggaacagcgatagcgatagctgatgtaacgccggcttttccttggccaccaagtattaaaataattgcagatgcgattgatgccaaagcagcatcgggtgcaacagcggcaccaatgttagcccaacctaaggcgatcatttgtaatgtcccacctaagataagacaaggtagtaattgaccggttacaagaccgattagtgtacaagcaataactggctgatggaaatggaattgatctaagataccttccataccagctagaaatgcgataaaaatgaccaaaatcacttgaatgaaattcaaatccatgattattaatcctccaatttcttctgatgttatttgttattttgtttgtctagttctgcttgtgcttttttaaggatactatccatgttaccgtttgagtcacttggcactttacgaacatcgaacttgatgcccttagcttttagtttttcaaaggtatcaatatcatcttggtcaaaagccaaaacagtatttggttgcactttaccagttgagtgcgccattgaaccaacgttaattgtttctaatggaacgccaccttcaactgctctaagtgcatcttgtggtgattcaaataataacaaagcacgttccttaccaaagtgttggtcatcttttgccaatttaatcatttgatcaactggcacgacgtgtgctttgatgccactaggagcagcttgtttaattaagtttgtccgtaattcatctttagcaacgttatctgaaacaacgataatccgtgttgggttagttgtcttcgaccatgtcgttgcaacttgaccatgtaataaacgtgaatcaattcgtgccaagacatatttgaacttaccaggtgtgcctgagtttgaagtcgtttgtgcggcttctgccttaggtgcttcttctggttgtagttcttcaggtttaacccgtacccctgctttagcttcatcaatgatatgtgctgcgatttcatgagcagatgtcatagataaacgagatgcgtaagcttcaatcaacattggtaagtttaatcctgtaacgattgcccacttatctttatgtgcttcgaacaacccattagcttgattaaatggtgaacctccccaaagatcaactaagaataagacgtcatcatctgcatcaaacgttgcaacggcagcttctaaatgcgctttcaaatcatctggtccttcatttggcataaaagtaacagcttgtactttttcttgttcgccaaaaatcattgagccagattgcatgattcctttagcaaactccccgtgacttgcaataacgattccaaccattcacaaaaacctccttaataaaaatagttgtcatactcatcaataaaacgctatcaattaatataaaaaaataatggcttaaacattattgactgagttaacagttccacgtttttattttttaaaacgctttactgaattaattttaccacaaaattctaatctgtctaatcatttttagattatctgcgaaattggtctagataatcgacaaaaaagcgctaaaagtcgcattacttaagcttttataattagataccgctaatgtttgcggtgtgctaaaatcgttttttatacaaaaaagaccttaaatcgattgatttaaggtctttgctttatttaagttcattgccactcatatattgttgatgtttttgttcatcaaattcattctctgacttggcaataatgactgctgctaatgaatttcccattacgttaacggcagttcgtcccatatctacaatccgatcaatccccgcaatgaaggccacaccagcagccggaacgccgattgtggtgattgttgctaataagacaacgaatgaagcacccgggaccccagccatccctttagaggtaatcatcaagaccaccaatagcgtaatttgttgggtgagacttaaatgaatgtgataggcttgcgccaaaaacagcgccgctagcgattggtagattgccgaaccgtccaagttaaatgaataacccgttggaatgacaaaagaagcaatcccttgactaacaccgtaattttgcactttttccattactttgggtaacgctgcttctgaactcgccgttgaaaaggctagcaccaattcttctttgaaaactttcaagatttcaaagatattgatgtgccaaatccgcgcgaccaacccagccacaacaaccacgaaaaatgccatcgttgcgtaacaaacgatgatgaaatagagcaatggtttcaaagcttcaaatccgaattgggcaattgtaaccccgattaatgcaaacaccccgattggtgctaactgcataatccagtttgtcatcttgaacataacctctgaaatcatttcaaaagcatcgatgagcggggttgcctttttaccaaaggtcgccaaccctaaaccgaacatgaccgtaaagaagatgactggaatcatttcaccagaccccaaggccgcaaagaaattcgttggcacgatatccatgatgatatcacccaagccatgatttccagcggtcttagcggctgctgtgtactgactaattgagccatgtgccaaactatgaatgtcaatcagcgctcctggtttagcaatattgccgacagctaatccgagaataattgcgaaggtcgtcatcacttcgaaatacaataacgtcttaccaccaattcggccaagttttttgatatcacccatcttggcaatcccaacgaccaaagaggaaacaacaattggtaacacaatcatcttaattaaattgatgaacaaggttccaattgattgtaagattgagatagcggtttgattatggtagaaaaaccgaccaaccactaaccctaggccgattccaattaagattcgccaacctaggctaattctaaaatatcgttgctttttcatgttttatccactcctcttgaatgccgcaaatcggcttttaaattgccaataagtccattaagtgttcaatttcgtgtgttggctgtatgtctgtcatttgatttgctagctggttcgggttataccacgctgtggcgacacccacgttctgcccaccttgcacatctgaagtaagtgaatcaccgacaatcaaagcttctgcttgtgagattccctctaattgttggaagacactttggaaataccgtggatctggtttttgatatcccaactcttccgaaacaaaaacggcatcgaaatatgtgattaatcctgaatcttgtaaccgccgatattgcgtgttggcaaccccgttggttgtgacatatagcttaatgttagctgcttttaacgcctttaacagagcttctgcttgtggcattaaatcatggcctaatgccaagttgtctaaataattttgggacaatcttggtccatcaacttcctgattaaactgttctttaaagaaggttgcaaagcgtgtgttcaataatatttcccgggttaacgtaccttcttcatactgccgccacaagttttgattaaaggtctgataagttgtcttaattgttggggtcaattgaaccccttgatctttgaataattgggccaaagcttgatcttcatccgcatcaaaatcgaataaagtattgtccatgtcaaaaaataaataacgatactgcattgtaaatcctcatttcaactaatctaaatattgtaatttgcctctaaagtcagacagtttagtataacctttttgagccatgcttgtctgtaattcgcgcgttaaacgttcaaaaataatggggccttctttttgaagcgctgtcccaacttggaccatgctagccccacataaaatatgttcaaatgcatcttgaccagatttaatcccaccagtcccaataatttgaatggctggattcaaacgctgatagaaggcatggacattcgctaaggcggttggtttgatataatcgccaccgatgccaccgaaaccatgcttaggtttaatcacaacccgttcagttgccacatcaattttcaagccatttccaatgctattcaccgaattgacaaacgctaatggaaattgattcaaaatcgccgccatctgatcaaaatgcacgatatcaaagtacggcggtaatttaacgcctaatggaccgtgataaaccgtaaaaactcgcgttagaattcgttctaccatttcaaaatcatagcccgtttgcggcttccccggtacgttcggacaagataagttcaattccaccacacctttaaaatcagaagcactaatctgtgccaacagttgctcgtcttcttcaatattaaatcccgtaatcgattgaaagtatgtcttgtctggcactgccttttgctgttgactcacatagtctaaataataaggtaggccttcattcggcaagcccattgaattgatactgcctaaacgcgttggttgataacgtggttctggatttccagagcggggcataacggtggcactcttggtcacgaaagtccctgccattgaagcctgcacttgatttaactcagcagcatcataacaataaacccccgccgcgttcatgaaacagttatcaaagtggtacccagctagtgtcgtttcagtcgaaatcaatattcttgcctcatctctaatttgtttttagtttattatacgtgaaatggcatcaaaaaaccactgtttatgaatatcattcgtaaataacgtgatataaaatccattccctcttttttaaacctaattaaccgaacaaccaataacgcagcacatataaaaatcccttggtagtgaatagagataatacttccatctattcattatcaagggattattttcgaatccattctaatcgatgacgcgctcaggattgggacttcattgaatcaggcttttttcgcttgtcgttttagaaaaataatatacccaactaagagcaccaggaatatgccaccgcatgatataccaccagttaatggttgttttttgtaaatcaacggcttggtcattagcttgatggtttttgctctgtaatattaaaccgactcgtaaaataccactaaccgcccgacttatcagtggcggttagcttaagcatttatttgcccggcttcagcgcttcattatcccagttgatggcgtactcaaagttcgaattcggtgccatcgcaatgtctgatttgactgtccggtgaagcacttgatcagagcctaacttggtaaccaccgcatcaactttcaagcctctgatcataacagcctttgtattctgtaaattagccgtaattgctgtccgatagttaacgagccccgctttgatgtgattcagtttcagatttggcgcaataatggcatcactttcggtcactttcagaccgattacataagcgaattggttacgcaatgtcacgcgattcttttgctttttaacggtaggctgcccttcacgaacaatattaaaaccacctaataaagtacaatggaacttcttagcaggcattttaattttgaaaatggcgtccttgctactgtgagccggcaccgttacttttttatcccccgtaatcagtgaggcaatattagcaggcgccgtttcatccgcttttttctttgactggctataatcaacgaccccgttttgattagtcaccgccgtattcggactgatgttaaagatatgcgcttggttatccttattttgcaccgtgatactaatcgtctcttcctgattaggtgccagccttaaatcaaaatacgttacactttgattgttttgactgctgggtaaattcgctttaacttggtaattcatactctgatcagccgcttggacggtcgttgtattcaaccacaacgcgatgccgcccattaagatgacgacgctgattctttgtaaaatatgcatccatttcatttttgaagtccctctctttaatcactttgcacatcgattaaaatttagtccgttgcagtaacgacttaacacttgcctctttcaaatttagcggctgctgccagctaattgaagcggtgtatccccaagtgtccaggtcaaatcagcattatagctgccagcataagcgccaccagcgatatccagtgtaatgccgtcagttgtcatcacatctgcccatgttcccatccctttatctttatcagcactcatcaagatttgcgcattatccaacccatcagcaggaacagtaatcgctttggctgttggtgcagcagtattcgttgaatcactagcgactactttaccgactggaaaattaatctgtgcgccttttaagatatgcgttgaatccgttgtgtctttaaattctgaacttttaacggtaatattccagccagcgccagttccccgtttatcggtgacttgtacgttaggatctttaacaatattcttaacgttttgcgcgccaccagtcagtttcaccttaccaaaatcaagtggtgttaaattatcaatcgtgatatcccctgttgcgccagttggtccgtttccgtttccatctgtccctggcacaattggtgggttagtcgttgttgtgtcccctgcttctagtgcaattttcctcgtagttgtttcattcgatgttgtcgcagcctgtacacttggtgccatcacgatatggcctaatgttactaatgataaataatcaccattttgcggtttttgaagttgtagatggtttagcgcgtacaagcgacttggtaaacgctgatatgcactatcttgtcctggaaaattataagcaacatggcctctatctgggccatcattgggtagcaaaccgtcaaaatcattgccattatggtacgtatcgaattcaacggcaaatgacttggcgattgctgagttatcttttacccaagaaaatggattccgccaaacaccaagggcgccaccggtcacttgctgccaattcttaaccttgtctgggtcattcatcattgcaaaggccatcccgtcaaccgattgcgcttttttgtcccctaaattgacatacattaaacttgtaaaattatgtgtcaaatcaatcttatactgctcttccgaccaaattgcccccttcttgttctggctatctggtgtcacttgcacaattccacctgcttgaacggaactatctaccccaatggagggtttaaagatgccatcgattggaatatgggcgggtatcgctgcttgagtacgaccactattgatacagataaacgtcaataacatggtcagcattgttgcacccagcgctaattttcttctatccatcgtctacctccatatgatttttctatttttccattcatcactacacctttggtacggtctagttatcaattgggatatcaaagattcaatcaattaatcaccaattggacttaatgttttttcattctgacaagctattaaattgtgtacaagttgttttaaaacgaatctgttaaatcttttaaagagataatccctgtctatgattatgcaacatgtgtaaacttctttaatgccgatatttgtattcggttccatgtcatcaaaatggtcgcgctggagcttcattttatccgcaattttcatcatctaattttaatctttttataattaacattggtagaatattttcacaacaatgcctatatatcagtatttgtacccatgaacatccctttaaacattaaatttcaggcatgcaaaaaagcccccagagatgattaaatgaaatgcatttaatttcctctggaggcttttttcaaatggttgtttattcagtcaattacggcattaacgaattgcaactgcttctatctcaacaattgcgccagctggtagtttaccaacttgaacggcacttctagccggtgcgatatcaccgaagaatcgcgcatatacttcattgaattcgttaaagtcatccaaatcagttaaaaaacaattggttttcacaacgttttctagggataatcctgctgccgctaacacgtgttgcatattcgtgattgcttgttttgtttgactcgctaagtccggtgccaattggccatcttttaatccgagttgccctgacataaagaccagttgatccgttgcaatcgcttggctgtatggtcccaatggttcaggtgctaagttagtgtagattttctctgtcatgctatcgtccccttcacattattaaatccgttttcattgtaatgcactttgccgcctttgacaacattctttgtgtttctttgcacaaaaaaagcgccgtctcaattaattgagacggcgcgctgggggtaagatttaggggagtgtcagctgaacgacacatttaagctttagatatattgaacaatttgcatcaagattgggacaacgaccacgaataagacggtacttgttgtgacaacgttcgttgcatatttaacgtcaccatgtgattgaccaactaagattggtaagacagccaaaccaggtgttgcagcttgaataatcaatgtgctttgttcgattgatggaattgaagttgtgttcttgaagaatagcatgatggcaatcatgatggctggtgccacaacgaaacggcctaataacgcaaggactgtatcgcggtcgaaatggattgatttcaaaccagcatcagctaagataatcccaatgtagatcaatgacattggtgttacgatgccaccgaccattgagaaggttttatcaactaattctggtaatggtaaaccagttaaaagataaattaatgcggctaagaaaccgattaatggagaaggtaataatttacgccagttaaatttgcctttagcagcgcctttttctttggttggatcatcatttgagatgaagaagaccccgattgcccatgttgaaaccgtattggccacatagtagatcaagaagtaaggtaaactcttgtcaccgaatagtgccaagttcaatggtaaaccaatgaagatggtattggcattaacgaacatattgataaatgtcccacgacgacctggccgaattcggaaagccttggttagtaaccatgccacgagataaccgagggcgaaactaattaagacgtaaatcaagccgccagataaaccgaccaacttttcacgggttaagttatctaatactgagacgaaaattgataatggtaaagcgacattcatgattaaaaatgaaattgtgcctttaaaattatcatcgaatttttttgaactccgtagccaaaaccccaatgcaatgactaagacgatttcgacaacgcttgataatgatgttagaaatgctgccaactctttcacgctcctaccgatttatatttaaattatagtgctttgtattctggttcccatttcatgtctgcgacggctttttgcacgtcagcaattggttctttattcaaaccttgatcaacagcgctttgagcaacagcgttcgcaaccgtttgtgagaagatatctagttttgtcacaggcggtaagacagctgcgccaggttctgttggatcaacgatgccacccaatgagtgagctgctttgctaatcatttcgtcatttaagactttcgcagttgacgcgattgtgcctaaaccaagccctggatagactaaagcgttgtttgcttgaccgatttcatatgtgacaccgttgtattcaacaggtgcagcaggaatcccagtcgctactaaagctttgccgtcagtccacttgattaagtctgcagcagttgcttcagctaatttcgttgggtttgacaatgggaaaataattgggcgttctgtgtgagcagccatttccttcacgattgattctgtaaaggtcccaggttgggttgaagtccccactaaaatagttgggtggattgctttgacagcagcttctaaagttgttaattcatcagcattcgcgaattcactccgtttgcgcgcaaatggtttttgttctggtgttaattctggatcatcatcaaacaatagcccttgcttgtcaaccatgtagaaacggctacgtgcttgttcttcagttaaaccttcttgtaacatttcttcgaagatgcgatgggtaatcccagcacccgcagtcccagcaccaaagctcatgtaaacttggtcggtcatcttgccaccagagatatttaaagcgcccataatcccagctaatgtgataatccctgtgccttggatatcatcattgaacgtcacgatttgatctttgtacttgttcaaaatattagcagcattgctccggccaaaatcttcaaagtgaagatacatattagggaataggtcttcagctgtttgcacgaattgatcgacgaaatcgtagtaacgatcgccgcgaacccgttcatgacggttgcctaagtataactcatcattgagtaagctttcacggttcgtcccagcatctaaaacaactggtaagacttgactaggatcaatcccggcagcagccgtataaaccattaatttaccaactgagatatccacaccttgtgtgccccagtcgccaatccctaagattccttcgccatcagtcacaacgattaatttaatttcgcgaccatcagcagcgtttgccaaggttgtcttcattgaatcaggatcgtcgattgataagaaagcagcgttttgggggttcacatataaagcactgtagttttcgattgtgtcagcgatcgttggatcgtaaaccactggcatgaattcagcaacatgttggctgaataatttaaagaacaacacacggttttcattaaaaattgacattaagaaaatccgttgttcaagcatgttggcttttgattgatattgggcataagcttgtttaacttgttcatcaatggtttgcacgtgaggtggtaacatccccgttaaaccaaattgtgcacgttcttcagcagtgaatgctgtacccttatttaaaaatggatcatttaaaatttgttgtgctttcatattaaaaatctccttttcttttatatcatgttggtcactatacacgcctcaacatttgatagtcaaaacttacatttatgataaaatagatttatatgaaacgtctaaactgcattaaacaggagtttttatgaagattaaagatttggcctattttgctgcgctaattaaattaaaaaattttacggcagtcgctgatcaattcaaggtcagtcaaccgacgatcacttacgcggtcaaacgccttgaagatgaattcgcgaccaaactcattcagcgcgatcaatcacaccaatcattgattattacccctagtggtgagcaactttatcaacatgccgcgcgaatattagcggagattgaactaacaaaggccgacatgctcaatctcaacgctactgatttgcgttttggcttgccaccaattatcggcacttactacttctcaaaattagcacaaaagctagccgctaacggcacgattcaacattttaagacagctgatgggggttccaaagaattgttggcttcattagaagccggtgaactagatgtcgcgcttcttggctctgcgacgccacttcaaaccgataccatcacagctaaagtcatcgaacgtcaccattttaagattgtagttgcacctgatagtcccttagcccagaaaccagcggtcacctttcgtgatttagcccacgagaaatttattatgctcgcggaaggattcgtgcatcccgtggtcttcaagaacttatcggacgtcaatcaaatcaaacccgaaattatttaccgcaccaatgacgttagtgtcttaaaaagtatggttcacgaaaatgtcggcatcggttttctaactgaaaccagtattacgcctgctgatgacttagtggtacttgatttattggatgaaccacaaccaatcttttacatctcgttagcctatcgtaagacccagttcttctcaccaaaacaacaagctctcatttcgaatctcgaacaagcagcgcgagactaccgtcttgaacattaaaaaagtggtggcgacaaaattaatttttgtcgccaccactttttaagtatgttttaccataaaaacgctaagacagtttgattgactgcatgattttcgtgtaattgactatgctgcgcttttttaccagtaaacttcttttcttgataggtcttcgcaccaggcgtcaccaaataccgcaacgactgtgacgatgcattactaacacgtccgtcagaatgcgtcccatcgcctaaatccccatagatattcaacaccgtaatcgatttagtagggagctggttacgcagtcccatcagttgccgataagtcgcgttcattttttgtggttggccatcctttttaacctggttttgattaggctgatcatccatcccgataatcccatcaaaatgacccgcaatattcaccatcttcgccatacggggtaactgtttatcaatcgcatggttcaataaataataaacggccgtcaagttgcccatcgaatgagccaccacgttgaatcgtttgaagctgtgctgccgattaaccgcgactaagacgtttttaaaccactcaccatcttgttgatagttaggattgcgattatcttcgaaaacaacttgcacgattggtcgtgtcgttttagctaaccaacgcccctgtaaatcaactgaaccatccttacgaacggttgcagtgaggacctgtgtcgcattcttttgttcgcgagcagctttgatcatgctatcagtcgaacgagccgaaccgccataaccatgcaaataaaaagtgggctgttcattttctgtttgcttgacttgctgcgctttttgcgtcgttgcatgccctaaaagccaccatccactgccaattaaaactcctaaaccaatgatgattattatccatttagaacgtcgcatgcgcccgaatcccttcgcttttctaattacgcctatggtaccataccattcataaagggtgtcaattaatttagcgtaagttgatcaaaaaaataacccgggtcaattgacccgggttattttgctattaatggtaataaattgtaattaatgttactagcccaaatatgattcctgggacatttgaaatgatgattggccaatctttatgtggtttaaaccaaccgtaactaaaccacaaagtcgcattaaccatcgcaacgcttggttgaatcgccgacacagggtgcccagctaaattagccataatttgttggatatatgatacgtacatcaagaaacatgtcccaactgctatctttccaagccaagccagttgattgcgatcactatgaaccgtcgctgttttttgatacctaatcgttacatcttttgttttcatcttctacctcgtcactagtcttcgacagttatagtggctacgcgatcaattaaatgtgtcccatattgaaaagcattggcataaattgttagcgtcccgtctaaagcctgctcaaactcaaacaacgcttgattatctaaccaagtgatgctagttacgcgttgcggatattgattaaacactatcttccgcgccttttcgccacccagcacaacattactattacctatattacctaaaccatagacaaacagatagtttcctttgataaaatcggttgtctcgccacttgccaagtaggtctgattttcataatgatttgtcgcataaattgcttctccataaactgacatccattgtccgacaatcttcaataacgactgtgaaaatgctggaatggcaccgtcaaattcaagcccggtattaattaataaattagcaccgacttttctggaattacaaatttgatcaataagttgcttcggtgacacatagttaatgtcatttttagcaaccccccaatgcttattaaccgtcatcgaggtttcagctgctaaatatttttgtggtccttgatgattaatcgattgtggattaccccgttcaaatgttaaaacatcgatcagcggattgcgaatcgcaccttgttcctcaagaccagtgttattaaggtagattgtaaaattaatccgaacgctgttcggacaaaaaagatcagcttcctttaaaatggtgtttaccacaaacccatcttttaggagctgatcttttgtctagtataacctattccgaacgaattaaaatcgaaaccttttgtgaactagggctgtccaatatccaaatgggcgttcggctgaaccgatcaccgtcaacaatttcttatgaattatctcgatgtcaaccttatcaggctgaattagcacaaacagatgccgaatacaagcgatcacgatgtggtcggaaaactaagctgagcgatgagttaaagcaaaaaattctcaaccatttacgtctaagctggtcaccaggaatgattgctcacgaatttaaactagctactaaatctatttataattggctaaatcaggggagaattggtttctccttgaatgatctacctgaacatggcgtacgccaacggcgtaacgttgaccaacgatccaaatataatcaatctttggggcgatcaattgaacagcgtcccatgatgattaatcaacgtaagcgcatcggcgattttgaactagatacagtcgttggtcctcgtgggcatagtaaggcagttttattaactttaatcgatcgcaaatcacggttcctttgggcataccggttaaaagatcggacgacagcgactgttaatgaagcactaactaagttcctaaccacttttaatggtccggtgcacagctttactgtggaccgtggcactgagtttagtgggctagtatcacttgaatcacaatatggtattaagacctattactgccatgcttatacgccagctgaacgtggtagtaatgaacgctttaatcggaatttacgttatttttatcctaaagggactcgttttgagcacattagtgctcaagatttaacgacgacgttactccaaattaaccagcgaccgcttaaaatactcgactggcaaacaccgtatcaggttatgctgacaaatttgtccgaaaattcggattaaatttgcaatctaccaattaactattagtattcaaaagaaccatggtattaacgcaacaaaaaaagccctatctctaaggctttttaaaactgtataatgttcaattataccggtgatcggggtcgaaccgatacttccgtgaggaaacgggattttgaatcccgcgcgtctgccaattccgccacaccggcattttgaccaattaaggttagcgcctaaacgcaaaggcggtaaccggatttgaaccggtgataaaggttttgcagacctctgccttaccacttggctataccgccataaaagaacaaatcctgtcccttaaaaagtaaattgggctagctggattcgaaccagcgcatgacaggatcaaaacctgttgccttaccgcttggccatagcccaagaataaaggcggtatgtgggaatcgaacccacgtatgtcggatccacaaaccgatgtgttaaccacttcaccaataccgccatcattaacatgaataattatactacattcacacataatatgcaagctataatataaacagggatagtaggaattgaacccacactgacggttttggagaccgtagttctacctttaaactatatccctaaaaaatatggaggagagtggattcgaaccaccgaacccgaaggagcggatttacagtccgccgcgtttagccacttcgctactcctccaaaaatggcgcaggacagaatcgaactgccgacacatggagcttcaatccattgctctaccaactgagctactgagccattttgaaacggtcacaacgggactcgaacccgtgatctcctgcgtgacaggcaggcgtcctaaccagctagaccatgcgaccaaattgcgggagtagggtttgaacctacgaccttcgggttatgagcccgacgagctaccagactgctccatcccgcgataatataaaggagaatgagagattcgaactctcgcgtgggcagaacccacctgacggttttcaagaccgttcccttcagccagacttgggtaattctccataaaacatataaaatgtaacattgttacaatgacccgtacgggatttgaacccatgataccgccgtgaaagggcggtgtcttaaccacttgaccaacgggccatacaaaacggagaaggagggatttgaaccctcgcgccagtttcccgacctacacccttagcaggggcgcctcttcagccacttgagtacttctccatattatttagataatgggcctaaatggactcgaaccatcgacctcacgcttatcaggcgtgcgctctaaccagctgagctataggcccatgaaaagcgggtgacgagaatcggactcgcgacaacagcttggaaggctgtggttttaccactaaactacacccgcatattcatgatatggcgcaggacagaatcgaactgccgacacatggagcttcaatccattgctctaccaactgagctactgagccattttgaaacggtcacaacgggactcgaacccgtgatctcctgcgtgacaggcaggcgtcctaaccagctagaccatgcgaccaattgcgggagtagggtttgaacctacgaccttcgggttatgagcccgacgagctaccagactgctccatcccgcgataatataaaaatattataaccacctacaaaatctcaccaaacgatggaccttgtaggactcgaacctacgaccgggcggttatgagccgtctgctctaaccaactgagctaaaggtccaagttttttgaaaaatagcggcgaaggggatcgaacccccgacctcccgggtatgaaccggacgctctagccagctgagctacaccgccaaaaaacttaaatttataacatgtaacttacgttacaatcgggaaaacaggattcgaacctgcgaccccctggtcccaaaccaggtgctctaccaagctgagctatttcccgttatatgcacccagtaggagtcgaacctacaaccttctgattcgtagtcagacactctatccagttgcgctatgggtgcatttttcattatgatgccgaggaccggaatcgaaccggtacggtagtcacctaccgcgggattttaagtcccgtgcgtctgccagttccgccaccccggcttaatcataatgaaagcggaagacgggattcgaacccgcgacccccaccatggcaaggtgatgttctaccactgaactacttccgcatcttaatgccgactagacgattcgaacgcccgaccctctgattacaaatcagatgctctaccaactgagctaagtcggcataataagataactttcattgaatattcaattgaatgcgggtgaagggacttgaacccccacgtctatatagacactagaacctaaatctagcgcgtctgccaattccgccacacccgcattttggcgtgtaacttggccgatgagtcgtgacaggctcgaactgtcgaccctctgattaaaagtcagatgctctaccaactgagctaacgactcaatggaggttacagggctcgaacctgtgaccctctgcttgtaaggcagacgctctcccaactgagctaaacctccatcaataaaaagcgcggcaacgtcctatcctcgcaggtagtttcccaccaactactatcggcgctaagaagcttaacttctgtgttcgacatgggaacaggtgtatccttcttgctatcgccaccacactattttgtgcttgcgcactgagaagaacttcgttctctcaaaactgcataataagtaatatttcatttcaaaagcctaacattgcacctttggttaagtcctcgaccgattagtactagtccgctccatacatcgctgtacttccactcctagcctatctacctgatcatctttcaggggtcttacttccataaaggaatgggaaatctcatctcgaggggggcttcacacttagatgctttcagcgtttatcccgtccatacatagctacccagcgatgcgcctggcggcacaactggtacaccagaggtatgtccatcccggtcctctcgtactaaggacagctcctctcaaatttcctgcgcccgcgacggatagggaccgaactgtctcacgacgttctgaacccagctcgcgtaccgctttaatgggcgaacagcccaacccttgggaccgactacagccccaggatgcgatgagccgacatcgaggtgccaaacctccccgtcgatgtggactcttgggggagataagcctgttatccccagggtagcttttatccgttgagcgatggcccttccatacggaaccaccggatcactaagtccgactttcgtccctgctcgatttgtcaatctcacagtcaagctctcttatacctttacactctacgaatgatttccaaccattctgagagaacctttgagcgcctccgttacactttaggaggcgaccgccccagtcaaactgcccacctgacactgtctcccgccacgctaagtggcgcgggttagagtggtcatacagttagggtagtatcccaccaacgcctccatcgaaactagcgttccgatttctacggctcctacctatcctgtacaaactgtacaaacactcaatatcaagctacagtaaagctccatggggtctttccgtcctgtcgcgggtaacccgcatcttcacgggtattataatttcaccgagtctctcgttgagacagtgcccaaatcattacgcctttcgtgcgggtcggaacttacccgacaaggaatttcgctaccttaggaccgttatagttacggccgccgtttactggggcttcaattctgggcttcgcttacgctaactcatcctcttaaccttccagcaccgggcaggcgtcagcccctatacgtcatctttcgattttgcagagacctgtgtttttgataaacagttgtttgggcctattcactgcggctgacctgacggtcagcaccccttctcccgaagttacggggtcattttgccgagttccttaacgagagttcactcgctcaccttaggatattctcctcgaccacctgtgtcggtttacggtacgggtagtttatttctcactagaagcttttcttggcagtgtaacatcaggaacttcgctacttaatttcgctccccatcacaacttgtccttaaagaatcaagcatttcactcaactcaagacttgttgcttagacacacatttccagtcgtgtgcattccttagcttcctgcgtccctccatcgttcaaacaaaataaactagtacaggaatctcaacctgttggccatcgactacgcctttcggcctcgccttaggtcccgactaaccctgggaggacgagccttccccaggaaaccttagtcatacggtggatcagattctcactgatctttcgctactcatgccggcattctcacttctaagcgctccactagtccttacgatctagcttcatcgcccttagaacgctctcctaccgcggacacttacgtgtccacccacagtttcggtattatgtttagccccggtacattttcggcgcagcggcactcgactagtgagctattacgcactctttaaatggtggctgcttctgagccaacatcctagttgtctgtgcaccgccacatccttttccacttaacataaattttgggaccttaactggtgatctgggctgtttccctttcgactacggatcttatcactcgcagtctgactcccggaactaaatcaatggtattcggagtttatctgaattcagtaacccatgacgggcccctagtccaaacagtgctctacctccatgatccaatattccgaggctagccctaaagctatttcggagagaaccagctatctccaagttcgattggaatttcaccgctacccacacctcatccccgccattttcaactgacgtgggttcggtcctccagtgtgttttaccacaccttcaacctggacatgggtaggtcacttggtttcgggtctacatctatatactcactcgcccatttcagactcgctttcgctacggctccagcttttcactttaacctcgcatataaacgtaactcgccggttcattctacaaaaggcacgccatcactcattaacgagctttgactaattgtaggcacacggtttcaggatctatttcactccccttccggggtgcttttcacctttccctcacggtactggttcactatcggtcactagggagtatttagccttgggagatggtcctcccggattccgacggaatttcacgtgttccgccgtactcaggatccagaacggaggttaagttgtttaatctacgtggttatcacactctttgactcagcttcccagctgattcgattacaacttaacttggtaactccaatgttctgtcctacaaccccaagaagcaagcttcttggtttgggctcttccccgttcgctcgccgctacttagggaatcgatttttctttctcttcctgcaggtacttagatgtttcagttccccgcgtctaccttcattaagctatgtattcacttaatgataatacccgactaaaggtattgggttcccccattcggaaatctccggatcaaagcttacttacagctccccgaagcatatcggtgttagtaccgtccttcatcggctcctagtgccaaggcatccaccgtgcgccctttataacttaacctaactttacctacggtaaagggttattatttgagtttagcgatatgaactaattcatatttctattaaaaaactctttaaaacgcaatgttttctcggcttttaaaactaatatattacttattatccagttttcaaagaacaaagtttcgatgactattgtcatcaatggaggataacgggatcgaaccgatgacctcctgcgtgcaaagcaggcgctctcccagctgagctaatcccccgtgttggtactatttaattcttagtacaatgggcctaaatggactcgaaccatcgacctcacgcttatcaggcgtgcgctctaaccagctgagctataggcccaaaaaacgttctaattcaatgagagtagacctctcaaaactaaacaaagtttcgacttcgcaaatgtacaaggttttccgtattattccttagaaaggaggtgatccagccgcaggttctcctacggctaccttgttacgacttcaccctaatcatctgtcccaccttagacggctggctcccgaaggttacctcaccggctttgggtgttacaaactctcatggtgtgacgggcggtgtgtacaaggcccgggaacgtattcaccgcggcatgctgatccgcgattactagcgattccggcttcatgtaggcgagttgcagcctacaatccgaactgagaatggttttaagagattagctaaacctcgcggtctcgcgactcgttgtaccatccattgtagcacgtgtgtagcccaggtcataaggggcatgatgatttgacgtcgtccccaccttcctccggtttgtcaccggcagtctcactagagtgcccaactaaatgctggcaactagtaataagggttgcgctcgttgcgggacttaacccaacatctcacgacacgagctgacgacaaccatgcaccacctgtcactttgtccccgaagggaaagctctatctctagagtggtcaaaggatgtcaagacctggtaaggttcttcgcgttgcttcgaattaaaccacatgctccaccgcttgtgcgggcccccgtcaattcctttgagtttcaaccttgcggtcgtactccccaggcggagtgcttaatgcgttagctgcggcactgaagggcggaaaccctccaacacctagcactcatcgtttacggcatggactaccagggtatctaatcctgtttgctacccatgctttcgagcctcagcgtcagttacagaccagacagccgccttcgccactggtgttcttccatatatctacgcatttcaccgctacacatggagttccactgtcctcttctgcactcaagtttcccagtttccgatgcacttcttcggttgagccgaaggctttcacatcagacttaagaaaccgcctgcgctcgctttacgcccaataaatccggacaacgcttgccacctacgtattaccgcggctgctggcacgtagttagccgtggctttctggttggataccgtcactacctgatcagttactatcaaatacgttcttctccaacaacagagttttacgatccgaaaaccttcttcactcacgcggcgttgctccatcagactttcgtccattgtggaagattccctactgctgcctcccgtaggagtctgggccgtgtctcagtcccagtgtggccgattaccctctcaggtcggctatgcatcacggtcttggtgagcctttacctcaccaactaactaatgcaccgcgggtccatcctaaagtgatagccgaaaccatctttcaaccttgcaccatgcggtgctaggttttatgcggtattagcatctgtttccaaatgttatcccccactttagggcaagttacccacgtgttactcacccgtccgccactcactcaaatgttatcaatcagaagcaagcttcttcaatctaacgagagtgcgttcgacttgcatgtattaggcacgccgccagcgttcgtcctgagccaggatcaaactctcgattaaaagtttgtagctcttgttttgttacttaatttatttgctagcgaaattgactttgcaaatatgttttgtgccccgaagggcgaccctacacatttggtttgtcgaaactttgttcagttttcaaagatctactgtgttgaaacagcttaattaatatatcatttctaacgaacactgtcaagcgttttttataaatattttttgaatatttattcaatctcgtttgacccgttatttcgttagcaatgagcttttctctcgctgacaacatagaatactataccaacaatccaagacatcgtcaagcgattgtttacttttttttgaataaaaatataaaaagtttcaaaagcgtacattgttgaatagatattcaccgattgtccgaactaattcaagtgcgggacactcgtgacttctaacttatccagtaattccgtgaactcactagggttcgcaaatcgaaaaccggcttcactaattattctcaattgttcggtataaaaatcagtctcatgagctccccactgaaagacaaagaacgaaacgttctcaccttcaaggttaatattcgctaaattgatcaatctcaattcgttaacatcaatatttagctgtgcttggattgcaattaatacagcagcaagtggtgtttgatcatcttgcttattggtcaccagcatcttataagaagcatcaacttgtggttggaccaaaaaatcatattgtccttgctctgtcttatacataatcgttccggctactttagcactcatacattctcacccttattcaagtcttctatcgcttcttcagtccatcttggtaatcgttctgcaatgggcgcaaacccaatatgaatccggcgatttgtccaatagtgtttcttagcacgctgtggtgctaaatcttgtgctttatgtagcgcacgtaacgacaaactaatcttatgtgtgtattcatcgatatctaacactaatacatctaacacttgaccgactttaaactgttcatctaacgctttaacaaaaccatgaccacattctgagatgtggattaagccttggaccgttgcatctaatgaaacaaatacaccatatggttgaatgcctgttacagtacctgtaatcttttgtccaattcgataacccatattttcctccatttcaatattcctatctattttaagccttccagttagtaaaaggcaagctatcggctaagaccttttatacaatttcttctataatatgtaaaaagaacctgaggaaacatccctcaggttctcatttaactaaagttgatcagctgctagtaaaagtgccccagtaatcccagcgtcatcccctaatgcaacatgcacgatgtagtcatcaaggtcaggcgtttgcacataacctgccatttgacgtttaaaggattcacgaatcattgggaatagttgggcttgtttcgacaccccaccaccgaagacaattcgttctggcgatagcattaaagcaatatttacacaggcttgagctaaatagtcagcttccatttgccatgcttgatgatcagccggcaataagtggcctttcttgccccaacggcgttcgattgctggaccagctgctaagccttccaaacaattgtggtgataaggacatgtcccttcgtatgaatcttctggttgttgccgaattaacatgtggccgatttcaggatggctgtaaccttgtaaaatctgaccgtgttcaacaacaccgccaccaatccccgtcccgacagttaagtaaacacaactatcaagtccatcagcagcgcccatcttcaattcaccataggctgcggcattcacatccgttgtaaaagcaaactgggtatcaggataatgagctttcattgctcctaagatatcatagtgttcccaccctgctttgggtgtatcgatgattgagccatatgtttttgatttcgggttaacatcaattgggccaaacgatgccaaaccaatggcatctaaatgatcgaattgatcaaaatattcaaataaccgtggcatcgtttgttccggcgtctcggttggcatactaattcgttcttgtatcccattttttccatctgttacggcacagacaaacttcgtgccccctgcttcaattccacctactagcatctaaaacacctcttcaattaaaattaatgattaatcgtaatgtgattgatgataacttcttcaactggtttgtcttgcattcctgtttctgtagcgttgatcttattaacaacgtccatcccactcaagacgtgaccaaatacagtatgtttaaaatctaaccaaggtgtaccacccttttcataagccgtaatgacttcttctgggtaaccagcacctggcatttgtgacaacatgttttggttgatatgttcgtttgttacgatgaagaattggctgccgttcgtattaggaccagcattagccattgataatgcaccatttaagttaaagacttcttggttgaattcatcttcgaaaggttggccccagagactttcgccacccatcccagtaccggttggatcgccaccttgaatcatgaaatcgttgatgacccggtggaaaatcacaccgtcatagtaatctttttcagctaagccgataaagttttctactgtcttaggtgcttggtcttggaaaagtgctactgtaaattcgccacggtttgtgtcaaaagtagctgttggccctgcaaagtttgcaaggtctaattgtggatatgtcatttaatcgtcctccttgttttgactcacaatcattatgatagcgaattgcttcataaattactacgattatttcattaaacatgctttccttatttttttctagtatactaatttaagaaatctactattaaggaagttatctcatgcttgattcaaatcatctctttgatatcaccattattggcggcggccctgtcggaatgtttgctgcctattatgctggtatgcgcaaggccgatgttcagattatcgaaagtctccccgaactcggtggtcaagtcgcaacactctatccagaaaagcaaatctatgatgtcgctggtttcagtggtatctctggtgcacagctcaccgaaaacttaattgaacagctggcacttttccaaccaaccttgcaattatccactgctgtgcaaggtatcgaaccccaagaagatgggactttcgttcttaaaacaacgaagggcacgacacgcaccaaaggcatcatcattgccgttgggaacggggctttcacaccgcggaaactcgctgtcgattacgatccagaatgggaaaatcactatattcactacttcgcaaaagaaatggcgcagttcaaagatcaaaccgttgccgttgctggcggtggtgattcggccattgaatgggcactaatgctcgaaaaagtggctaaacaagtctatttaattcaccgtcgggatcaattccgcgggcttgaaagtagcgttgaagcactcaaacaatcaactgtccaaattaagacgccgtttttaatcgatagtttgaccgaagtgaaccaacaactcgcattaactttaaataagatgaaatcaaccgatcaagagcagctaacaattgacaaactccttgttaactatgggtttatctctgatactcgaattctccgtgattggggattaacattggaccaccatcaagtcgctgttaaccaacaactcgagacgaacatcccgaacatctatgcgatcggcgatattgctacctaccctggtaaagtgaagttaattgccagcggatttggtgaagcaccaatggctgtgactgagttactaacgaatctctacccagaaaaacgccaaccactacacagcacgtccattatgtaagagtgcgcaatatgcccgattaccttctgaggattagcctagtccagtaaattagcgacgcagtcgatgatttactggccgtagctaaccggaagaaggtggcttatggagcacgtttcgataagagtgctttaactagcggttagcttctgagtatagcatcggttagtgaatgagccgcacagccgaccgtttgcaaaccgtggctaaacggaagaagttgctagctaaagcacgttttaaaaaagccctgcatcaacgttttaaccgttgatgcaggactttttagtattttattaagcattattttttttcatttgactcttaaccgctgtgataaccatcggaatcaatgagaccccgataatccctaacacaacgagtgagaaatgttcacgcacaacagcaatgtttccgaagaagtaaccagctccgcaacagagtgtcacccacaagatactcccaatcacgtcgtaacggaagaacttcatgaaggccatctggctcccaccggcaacaaatgggacgaatgttctaataatcggcatgaaacggccaattgcaatggttttaccaccatacttatcaaagaagacctgcgcctcttcaattttctcggtattgataaacttgccgaagaaccgattcttcgtggcggctaaaccgacccgttggccaatttgttcattcaatgaatcacccgcaattgaggcgattaagaacaaggcagcaaacagccagacattcaagtcattatcagtccgggctgccaaagcagcagcggcaaataaaagcgagtcccccggtagaaacggtaagataaccgccccggtttcaacaaagataatggcaaacaagatgacataggtccagttgccgaactgattaacaatgttgaccaggtgggcatcaatatgtaaaacaaaatcaattaactgcgtcatgcgatttctcctatactctttttcaatttaaaaatatatcccttattaggataccgaatccatgcatcaaagcaatcacttttgcattttcttaataaaaagccaaacgttatagcgcacgtttaccgcgccataacagccaagcaaaactaccctctaacaaaatgaagaagagtgcaaaacaaaggccaaaatagacttccggtaacactaagataatcggatcagtgattggatcaaactgccagttcagattgtgaaacaataattcgtggaacgtaatgaaaaaccgatcgaaattcatactagcaataaaccctaatatgggtggcaccacaagagcaacttgcattgggcggacgtattgccaaacccgattggtcttgcgccgactccgccaatgctgaatcgccgctccaatcgttactagccaaataactactgctaaaccaaacaagcgtttcacttcaacaaaatgttgccgaccatccaatgacattggaaagtcaggtagttgtaagcgtggttgccatggcacaagtaagtagcccattaaccggttaaagttcatcatcagccgcggttgcgttaattcccgttgactcgctagatcgaggtagtgactcactagcggataaagtgcccagcttaacaataacgttattaaaatcgcactgctgactaacgccaaatacaacgccgcccaactagtggtacttctaacccgctttaaacgtcccattcggttaggtcgttaatgatatgcgttggttgcaaggcttcttttgccacatcctctggcgttgaaacaccagtgtaaactaacaacgtatccatccctgcattcaagccagccttgatatctgtattgtagttatcgccaaccatcaccacttgttccttcgtcaagccgaattgctctaaggccatttccataatgattttttcaggcttaccgatatagagtgcactttgttgcgttgcccgttcaaccatcgcaatcactgaaccagcacctggcactagcccgcgttcgtttggtaaattcgtatccgcattggtgccgatgaataatgcaccgcgcttaatcgctaacgttgctaattcaaacttgtgataagtcacatcataatccaaaccaactaccacgtagtctggatcgaattcattggttctaaaaccggcatctgatagagcctgcttcaaaccgagttctccaatcacgtagaccgttttgccattcgctgtaccaccgtttaaattcaatagatagcgcgccgttgccaaagaaggggtatacacttggtcaactgtcgcatgaatgtcatggttatccgccaaattctgaatcacagcagctggtgatttcgtagtgttgttcgtcaaaaacataaacggaatttgttttgcttgtaggcgttcaatgaaatctttggcttctggcatccgatcacggccgcgatacacggtgccgtctaaatcaattaaataccctgcataatctgtgtttgtcatagttgtctaactccaattacgttttactttttattgtgttccaaaggacggatcttaaaatgacgcttattaactgatttttgattctcggttaccgccttttgagggcgttctttagtcactttttgcttgttatcggtgactttccgttctgtaaaacctggcttttgacgccgacgccgttgctgaccacgttggcgattactccgccgattctcattcttaatgattggcttgccttgacgttccaaaacaaagtaggcacaaccaaagttgcagtattcgtatagataatcttgtaacgtattgattaattgatctttattagcgcgtttgttggttgctttgtaaaagcccttcaaacgcagttgttcaaagccccagtcagccacaatataatcgtacttagccaacacttcattatagcgttcgttcaacttttcagcgtcgaagccttcacgatagttcacaacgacttcataagcacatttatcaatctcaagcgtggtttcagtcttcatgacaacgtgttgtggcacttccggttgtttggctgaagcgatcatttctttttcaatcgccttggtcactttcttggcaatcttgggactgtttttcgtatccgccacagcgaacctcctcttcccttataagggataatgtttacttaaatatttagcgaccgcgtctctgagaaaatcagggaacacgatctcggtctcgccaacaatctcaattgttggaaagaatggaatgaatagataatgatcgacggtcgtcaacgtatagctggcttctggatcaatttcttgcccatgccaaaagacgcgccgcaatttcatatcaaccgctatcccgtcataaacgatgtctccaaagattttaccacggaaactcatccctttaatagggaacttgcgtaaaaagagccggtttttctccatttcaagcaccatccgccacaaatcataccctttgagcgtcactttaatcagatgcattggatgcggtaattgagtttgcaaatcatctttagtaacaatcccagcctgcaaatcttgcaagaacaagccagtattcaatacggcagcttcagtgctggtcgcttcttcaattgcctttaaaccggtcgtcatcatttctgattcaccaattgcgttgattttaaaagcgtgtggcaacttggcaacatgctcggcggctaattgtgcgtgcccctttttcaggtagccttcaatttctgctgcgtcagtcttcacaactggtaagtccgcggttaaaaccgtccgagcacttttatgcatcacatggtgctgatcatccagttcaagcgtgatatcaccaaggtaatgaccgtacttctcggcagccgtcaataaggtttgattaaccagcagcccctcttctaaaagatgatgcgtgtgcgcaccacagacgacatcaatctcagggaattgttccgccagccacttatcagtcgtaatcccaagatgtgataggacgattaagatgtcatattgaccttcaatcgccgctaattgccgcggcaactcttcactgacagtcgtcggttcccaaccattcggccgataagttaagaaaaatggtgcggtcaaggcaataattgctacccgcgttccagcatcggtcgtcattagtcggtaagattgcgcaaatgctggcctttcgtttgttgcttgttcatacagattagccagtaataccgggaaattcgccttatcatacaaatgttccagatcagcatgactattaccgattccttcattgtttccaatcgttactccgtcatacccaatttgattgagtaactcggtattaatctgaccattcgttgcttcagtcaatggatgactacgatccattgcatccccgatgtcgaaggtcaagaccgtatccccttgctttcggtatgctgcttgatgttctaagaggaagcgccgcattctgggccaattttcaaaatgtgaatgtaagtcattcgtgtgtaaaatatgaattgtttccattttgcttactcccttcagctagtcgtggctggggtttgccagcgcggcttgtttgcgttcaaaaatgatttcaatctcatttgccgcaaggggtgttccaaacggcacccgttcaggtaataattcgcgctctggtgcatcaatcccgacattgatattctctgcaatcggcaacatataatgatgaatatgtccgtgcaagttgaacgtctgttggacctttcccaataataacggatagtgggttaaaaaatactgatggtgattgatcttaattagctcaccgacatcagcaaattgataatgcgccttgccagctgataatcccgcatcatgtttcgccaaatatttcaaaaaagcacggttatcatgattacctttaataataatcagctgcccattcaactgctctaacacagcagcgacttcagcaaaagcactcggcttattgggcaccattgcgacgtcacccaacaaataaacctggtcgtcagcttgcacccgttgattccagttagcaataatcgttgcattcatcgtagctacatctttaaacggacgcggcgcaaaatcattattacctaataattcggcgtgaaaaaaatgcgtatccgctgtgaaataaatcattcacaatcccacctaaccaatatgatttgcttttaaaatctcctgaaaggcttgcgcaactgcgccgtcttcttttttccattcttcccagtggtcaaaatcaaccgcaggcattgtgtaacgttcattaatgtaagcttcgtaagtttggaccgcattcgaatgcggaatgttgagttgtaaaatccggacttgcttaataaatccccggttagccgctagttcggcacgcccattcataaagatgttagccaattcataatacgttgtgccatctaagcgcgtaatttcttcaataatatcaaatgtttggtacttctccgccattgtgttacttcctattctaatccgatttcagttacgtttattctaccaatatgtacacaaaaaaaccactacccgcagatagtggttggcataagagagaaagagaattgataaaaaggtaattgcataagtaccttacaaacataatataccgtctaatgtaagcgttgtcaattgttatttttaatttatttatccgtttctttaaagttctgtaacaatcgtaggcatttgaaaggaataatggtatcttaaaaagagtagtttttatcaattgaggaggccattgatttgtcacagcaacattcacgatgggggcttttagtattaacaagcctttgtttctggtttttaaccggttttaccgttgtcgctcatcgtggcgaccccatcaacgcacccgaagaaacatttcaaagtatcgacatggccttttcgcaaggcgctaactatgtcgaactcgatttacacgaatctcaagatggcgtcttagtcatctcccacgaccgtaacttacaacgcgtcacggggaccgatgcgattgtttcgcaaaatacttttgccaagctcagtgaactcaaaatgagtaacggggaaccaccacacagcgtcgatcaattatttgagcactatcaaaacaacccaaatgcgaaattcctcatcgaaaccaagaaaaccaaaaagggaaatccgcaggacatggaagcaaaactcgtagcgctgattcaacaatatcacatgcaagaccgcgttatggtccattccttttccctcgctagtctgcaaaacatgcaacgtttaatgccagagattccccgcatttttatcgttggcagtttacagcggatttcattcgagagttttaaatacgccgacgggattaacatctcatcatccctcgtcaccccaaccatcattaaacagctccattatctccatcaaaaagtgtatgtctggaatgagatgtctgaaaaccaagcgacttggaactggttagtcaacctaaatgtcgatggcgtggtcacgaactatccggcactgggacgccactatcaggccgcacaggatcaagcagaaagtgaagccatcgacacaattgggcaagtcaatgacgttcaagacctccccaccgttgaaaatccatatgaaccaaccctcaataaaaagccggctaaagcgggccatatctacaacatcaccgaagccgttacaattgccgatcaaacttactaccgcattggcactaaccgctttgtcctcagcgacagcatcaacgtcggtgaaacagcgaaagccgctgctttattggtgggtaaaacggcgcagattaaaccaactgcgaacattgtcgctacttggaataatccgctacaccccacccagacaaccggttatcttagtgccaattcacaacagcaaattttaggagtgcgctatgttggtaatcaagtctggttgaaagtcgctagtggttggttcaagagtcgccaagcattaatcgacttcaacccaaaccaatcgctgatggtaacccacttttaccgtgaaattccccaacaattgcggccaaccaacttactgattaacccagcactgccactgccactgcaattgccccaacaaccaccagtcgacgcgcaactgtttaaccagtttgcccgttctctacaactaactaccattaaattctaacgaggtcaccttttatgacatcagattatgaacaattgattcgttccgtccaaaatactcttccaaaggaagaaacacttgatcacatctcaattctttttaaaatactaggcgataaaacacgcgctaaaatcttgtacgccctctttcaatccgaattgcgggtgagcgatattgtcagtgtgttagagatgtcgcaatcctcaatttcacatcaattacgtgcactcaagcaagcgaaactggtaaaaagtcgtaaagaaggcaaggaagttttctattcattagctgacaaccatgtcatcaatatcttttcgcaagttatcgcccacgtcaacgaacactaaggatcctattggcaccgatcaaattcactttggtcggtgctttttttatgtcccaaacccatcatctcgattgcattctatcgtgtttggtggtatcttatagtcaacatatgaatatatgctcatacgtttgtttatttagtaaagattacgatttagcttttcactcaacaaggaggcctaaataacatggcacaacttcaattaatcggcatcgattgtgccgcatgtgctactaaaattgaaaagaacgttaacaagatggccaacgttaaaagttgctccgtcaatttcaccactcaaaaattaaactatgaactcaccggccaagaagctgttacggaattcgaacaacaactcgctactcttttgccaaccattgaaccagatgtggggattcaacaatcaccaaccccagaaccatcccccgcaaaacatgcgattaattatgatctcatccgaattctcgtcagctctttaggcttggcgatttcttatctggtccctttaagcgcgccagctaaaaccacgttgctcctagctgcctttgtagtcatcggctacgatatcgtctggaccgcaatcaaaaatattctccacggcgaatggttcgatgagcatttcttaatgtcaattgcaaccattggggcctttggaatcggacaatatgccgaagccgttggtgtcatgttattctatcaagttggtgaatatttccaatcattagcggttaatcattcccggcgctcaattgctaacttagtggcaattaaaccaaccatcgccaatcggttagcggctgatggcaccaccgaagttgttgcacccgaagcaattcaggttggcgaacacatcgtggtgaaaccaggggaaaaagtcccgctcgacggtgtgattactaccggcgacagttacgtggacacctcagctattaccggtgaatctgttcctcgcgcctttcatcctggtgatgaactactcagtgggacgattaaccaatcaggtttattaacgcttgaagtcacgaaaccttatgctgattcaaccatcgctaagattttagaccttgtcgaaaatgcaagcagtcaaaaagcgcctactgaaaacttcatcacgcggtttgcaaaagtctacacaccaattgttgtcggcattgcagccatcatggccattgtaccgccccttttattcggtgctccatttggcgattggctctatcgggcattgattttcttagtgatttcttgtccatgtgccctcgtcatttcaattccactcggctttttcgctgggattggaacggcttctaaaaacggcatcctggttaaagggagtaattatctcgaagctttaaacgatgtccaaaccgttgttttcgacaagactgggacattgacccaaggtagtttcagcgtcaccaccgttcattcggtcgatcaacaacctgatgaacttttagcactagctgcccttgtcgaacaacactcgacccatccaattggtcaatcgattttagcagctaaccaaacgccactcacaaagacgttatctgacgtccaagaaaccgctggtcacgggattagcgggcaactcaacggacaacttttacaagctggtaaggctagttggttacaagccagtggcattgcaacactcacacctagtgaagtgggcaccagtgtccatgttgcttacaacaaccgctacttggggtatatcgtcattgcggacaccgtcaaaccagatgcacaaacggctgtcgcgcagctaaaacacgccgggattcatcaaataatcatgttgactggcgataaccaacccgttgcgcaacaagtcagcgccgtcttaggtatcgataagtatcaaagcgaacttctgccgcaagataaagtggccgccatcgccaaactcacagaagaccgcgctaccaacggaaaaatcgtctttgttggtgacggaatcaacgacacgcccgttttagcccgtgccgacgtgggcgttgctatgggcgggttaggttctgacgccgctattgaagctgccgatatcgtcttgatgtccgatgaaccgacaaaattagcaactgcgatttcgatcgccaagtacacccgccgcatcgtttggcaaaacatcattttcgcattagtggtcaaaggcatcttcttattattaggcgcctttggaattgccacaatgtgggaagccgttttcgccgatgtcggggtaacgttaatcgcgattttaaacgcacttcggattttaaagaagcactaaccttaaagggttcatggagactttgtgaaccttttattttttaatggcaagcgctttttaaatctgtaataatatgctaaaatgtgaatagattaataattaattaaccgttttttggttaaaatttaacaatgaaagctgggactgcaatgacattgaattggcaacaagaagcagcaaagtataaggatcaaatgcttgctgacttaacaagtttactcaagattaatagtgcgcgcgacgttgaccataaagaagacgacgcaccacttggccctggcccccgcgatgccttgctacaattcttagcaatcgctgaccgcgacggttttacaacaaagaatgttgaaaacgttgcaggtcgcattgaactcggtagtggcgacgaaatattcgggattttaggtcacatggacgttgtgcctgccggtgacggttgggaaacaaacccatttgaaccagtgatcaaagacggtaagatttatgcccgcggttcatcagatgataaggggccttcaatcgcagcatattatgctttgaaattattaaaagacaacggtatcgaattaaacaaaaaagtgcactttatcgttgggactgacgaagaaagtgaatgggttgggatcaaccgttacctcgaagttgaaccaaaacctgactttgcaatttcgccagatgcaaacttcccaatcatcaatggtgaaaaagggattgtgtcatacctcatgactttcaaaccagttgacggtgctgatggcgatatgacattggttagcttcaaatctggtttacgcgccaacatggtgccacaaacagctaaagccatcttaacgggtgcaatgccagctgatttccaagctaagtttgacgcctatgttgccgaccacaagttacaagggacaatcacaactgacggtgaccaaacaatcatcgacttaatcggtaaaggttcacatgctcaagaaccaaaagccggcgtaaatgctgcaacacacttggcaactttcttagctgactttgccttagatactaaaggtggcaactacatcggaacaattgcccgcttaatgcacgaagattcacgtgggcacctcttaaacatcaaccacacagatgatgtgatgggcgacttaacagcatgtcctgcagtcttcaactacacacaagatggtgtagcaacagtgctcttgaacgtccgttatcctaaaggtgtgactgctgaaagcacacgcgacggtttagcaaacacacttagtgatcttgctgacgtaacaattgacggtcatgcacaagaaccacattacgtgcctggtgacgatccattggttgcaacattattaagcgtcttcgaagaacaaactggtcttaaaggtcacgaacaagttatcggtggcggcacatatggtcgtatcttagaacgtggtgttgctttcggtgccttaccagaagaacgcgaaaatgtgatgcatcaagcaaatgaatatatgcacattgaagatatcatgaatgccattgcaatctatgcagatgcaatttacagattaacaagatagagtgcgtaagcaggcgcttatatttcgagcattaactggatttgacgaattggcgatgcaatcgctgattttgcaaatttggttaagcgcagaaatatgcctgctgaaacacgtttagagtgtgacgtaagtcgggtatccaccgaggattaatacaaagttgtgaatgattgcgtagcaatcgtttgcggctcagggttaaccggaaggatatggctgatagaacacatttagcaatcaaaaaaaacggtccaaagcttaatcgctttggaccgtttttttgattgccttcatttatcagcaggcatcagcttaaacgttgaatgcccatctttgacaattgcgtataagatttgttgctttgtttcatcgaagtaaccgagattaacagccatttcgccatcaatctcttcaatcccctcaaaatgttcccgaattatcgaacgaacaaccttcatgttatccatgtgtttttgaattttctgtacagcaacccctagcgtgtagccttcatctaagaaatgcttgataaagatcgccttaatcattgtttgcgcgtcgtactcgcgggccttattgccatccaattcacgcgctttaatgtatcctttttgctcccagtagcggagttgacgcggtgtaacccccgccattttacaaacttcactaatcccaaaaatcaatcgatccgtatctattaactttaaaaaaaggtctttttgcaagtccccactccattcctattattatttttcattatagataatctattgggattgtcaagttaaataacacctttgtcaacttacttgacaaagataccaaatgcgtctaaactaataaatcgcatcaacaaaaacacacaaaggagatttttatcttgtcagacgctagaccattagatattcatgggaaaccatataatcggacagtcttagtcttggtcttattgattggtactttctgtaccgtcttgaaccagacgattttatcaactgctttccccacattaatgaaagcattcgatgtgtccacctcagccgttcaatggctcacaaccggtttcttactagtcaacgggattatgatccccattagtgcttggttaattaaccgattcaattcaaaagtcctctacatgtcagcaatgactgtcttcttaatcgggactattatctgttacatcgcaccaacgagctcatttgcaactctattaatcggccggcttgttcaagctgctggtgttgggatttcaatgcccattttgcaaaccattatgctcaccatcttcccacctgaaaaacggggaacagccatggggatggccgggattgttatcggcctggcacctgctttagggcctaccctttcaggctggattatcgattcatacaactggcgtgttttattcggcatgattattccaatcgtgattctcgtcttagtcctcgctagtttccaaatgaagagtgttattcaactttcaaaacctaaaattgatggcccttcaattattttatcaactgtcggcttcgggagcttgctttatggcttctcagaagttggcgataaaggctggggcgatgcgctcgttctcacaaccttagcaattggcgttgtggtaattgctttattcatctggcgccaactcacgatggaaaacccattcttggaactccgcgttttcaaatcacctgtcttcacaattgccgctattttaagtggtgtgacgaacatggcgatggtcggtgccgaaatggtcttgccactatacattcaaaacattcgtggcgaatctgccttccattcaggcttaacgttattagctggttccctcatgatggggattatgatgccaattacgggccgtatttttgataaatatggtgccaaacgcttagcaatgaccgggatgttcttattgatggctgcaactgcgccattcatcttcctaacagctactaccccaatcatctacatcgttgtgttatacgctgtccggatgtttgggatttcaatggtgatgatgcctgtcacaacttccggaatgaacgctttaccaatgaacttaattagtcatgggacagctgttaataatactttccgccaagttgccagctcaatcgggacagccatcttaatcagtgtgctttctagtgttacaaaaggcaatatgccaagcacacacatggtcaagacattaccattggccttccgcgataagatgattgatgccaccctttctggttatcacgcagccttcatcgttgctgtgattttctgtgtgattggcttcatcatcacattcttcctctcttcaaagaaatctacgattaatggaggtgccaaggcatgatcgtcattacactcgttatcagcacactcgcattattcttttcatcgattttcggtcaaaagatgtggcgaccaatcttaatgaccatctttggactcacatttatcgcttcactcgttttcatcgtccaaaatgatcacaatcattacggaatgaaaactgtgaccgaaactaagacgcacacgctcgtttcaagcgcagatgcgaagggcatgtcaatgcttctctatcacccacttggtaacggcactgaaaaagtctatctttatcggaccgatgccaaccaaagtaaacccaaagcaacccaaactgaaaagacaaccaacagtgttcaaaaaaatgctgataaagcagtcttagtgacaaccaccaaataccgcgtttatcaaaataatacggctaaattctggttcggaatttctggtaacgaccacgaattcgtaagtcgtcacaacacatttaaggttgctaaaggctggttcgttctaagtgatgttcaagctaaacaactcgctaaaacattaaaaggtcaacaagcacaacttaaaactggcgcagaaaatgccggtaaacaagctgtgatggctgctatgcaagccaatccagcaatgactgctgatcaacaacaagcggttgctaaaaaagcagcaattgcctatcaacaagccgcaatggctaaagtgatggcaacattgaaataatgcaatcaaaaaatcccccacatcgtgatttgatgtgggggatttttttgtggtggaaatgtgctccgtcatccatatccttgcggttaaccctgaatgtcaaacgattgctgacgcaatcattcgccatcctgtgttaatcctcgggatatacccagctggctacgcactctgttttgaaacgggctttttgaaacatcttcctgcgcttaaccaaatttggcaaatcgacgatttcatcgtcaattcgtcaaatccagttaatgctcggaagatacccgtttcaaacgcactcttattttgaaacgggctccatcaggcatactcttccggttagttacatatcgaaaacgatcggctttgccgctcattcacgatatgccactaatcctcagagcataaccgcctgctgtcgcactctatttgcttaacaagcttgctgctgcttcgtctacgatgattgtcacgtcgtcgtgtagttgtaatgcacttgctgggacgtctgttgtttgtgggccttctactgtgcctttgatggcttcggcttttgatttgccatatgcgaacaagacgattttcttagcttttaagattgagccaatccccattgagattgcttttgttggtacatctgcttcattttcgaagaaacgtgcgttagctttgattgttgattctgttaactgcacttcttgtgtattgctgtcaaacgcagcaccgggttcattgaagccgatgtgaccgttttggccaatccctaagatttggatatcaactgggttatcagcaatcacttggtcatagcgttttaattcagcagaaatgtcgcttgctaagccgtttggtaagtatgatttagtaaatggtttcttgtcgaataagttcttcttcatgaaatagtggtaactttggtcgtcatcagctgataagccaacatattcgtccaagttcacggatgtgcaacctgtgaaatctaagtcgctagccactaatgtttcgtagaatttaattggtgaactaccagttgccaaaccgaatactttagcgttgtttgctaaaccttctttgaagatttcaaagcttttttggccgccttctacttgatctttcactttaataattttcatcatgattatctcctcatcatttaaaaattcaagtcgtttattggtatagtccaattataaacggctaaaatttcaattgcaagccttttgacgctaaaaaacgcgctaaataattggtatacctaacgtttagcgttttcacggcatttcgttaaaagcttacttttaatcgctagcaaacgcccccctttttgtgtctgctgattcaaattggttaaccaattgcactatattcattgattgccgtgcatttctggatatttttcatttgtcttacaaatccgaaatcgggtatgataatgcgctgaactattatataatatgggacagtatgagaaaaaaggtggcgttattatttgaatgatccaaagcaccgttccagtcgatggcgagcactgctcaagtcgagcagacaaaaggtctcaacgctattgacatctgctaaagacagactcgcacatttgctccatttacccgataaacgttctgcacaaccaactaaggaacaaaaaagagcctacatccaagagttgagccaatcaccactctcttttaagattaacgtcttctttgaagccattaagagtatctttctctatgggatctcaattggcttaatctgtatggcgctcgctgctggaattggcgcgggctattttgctgcgttaatgaaatccgaaccaattcctaggtatcaagtgctaaagcaacaacttgataataccgatcaagcagccggtttatactttgccaagaacaataagttcggcgcaatcaaaaccgacttaattcggactcccatcaacatccatgagatatccccttatctaaaggatgcgattgttgcaaccgaagatgaggatttctataaacacgatggggttgtccccaaagcactcttgcgggccgttatttccgatgtcactgggtttggttcacaaaccggtggctcgactttaacgcaacaattgattaagatgcaggttttaacctcccaagtaacctttaaacggaaagcaaccgaagtcttgctcgccttgcgggtcgataagtatttcactaaaaaagaaatcttacaagactacttaaacgttgccactcttggccgtaacaataaaggacaaaatatcgctggtgttcaagaagcagcattgggcctattcggcaaaaatgctaaggatctttctctagccgaggctgcctacattgctggtctgccacagagtccttccgtctatacaccatatgatcaagacggcacccttaaagatcctgaatacttaaaatatggtctagatcgtaaaaataccgtgttattccggatgtatcgtgacgatcgcattacaaaggctgaatacaaagccgctaagaaagtcgacttaaccaaagaattccaaccaaaagccgatccagccgaaacaacgaagagttatggctatgtttataacttacttgaaacacaagcaactgatattatggccaaacagttagccaaagaagccaatgtttcaactgccaaacttaacaaagatccaaatctctacaaacaatatgaaacacaagcaactgaattactcagcactaaaggctatcaaattcacagtactatcgatcaagaaatttacgatgccatgcaaggggttgttcaccaacagggcgcaacattcggacggacttataccgataccgttactgacgaagaaacggggttacaaaagaccgtttcgtcccctgttcaaaacgggagcgtcttgttagataaccgcactgggaaagtgatttcttttgtcggcggacgtgatttctccctcaaacaaacaaactacatgttgaccaaacgttctcctggttcaactatcaagccattgttagtctatggtccagcaatcgatcagaaactgattggttctaaaacgatgttggccgatttcaagaccaacttcaaggattacgcaccaaccgattacggtggcacgatccagaacaaattcattccagctgacgaagcgttagcccagtcattgaatattccaaccgttaacctttataacgctttgaagaacacaacagatccttctaagtacatgagtaagatgggcatcaacctcaccgctgatgaatacagtcaactggggatttcacttggtgggaccagtgatggggtcagcgtcttagaacaggccagtgcattttcaaccttcgcggatcaaggtgaacataccgacgcctacgtgattgaaaagattacggatcccgccggtaatgtcgtttaccaacatcacgctaagaagaaacgcgtcttttcaaaagcaacatcgtacatcatgaaccaaatgttagccggcgttttaacagatgggactgctacttcaatttacgatcaactctactttaataccaacaacttagttgggaaaaccgggacttcaaatgataaccgcgatatctggtttatcgggagtacccctgggatcaccctcgcttcatggatgggttatgacagtactggtcgtaacttaactgacaactcaagccagattaatgaaagatactggtcaaaattggccaacagcgtttatcagatcaacccaagcctcatgcgtttggaagatgatcatgaaaagccaagtacggtcacaagcagcaaagtcttgaaattaactggtcaattacctggcacggtttcaatcaacggcagctcacagaacttgaacggttcaaccgtcacctcgctttataataactggacgccaaaagcaactagctatgaattcgggattggcggttctgcccggaactacgaaactttctggaaccactatttaggttataacaacggctatggttcaattacctatagcaccgctgatgaattaaatccaactagtggctacagtagtcgtcgcagtggcaccgcagcaacaacgacaaataattacacagcaaacacaactggtactgctgctacgactggcactacaaccggtacgaattatacagcgaataccaatccaacagatacagagacaacgaactaaactaaaaaaaggcctcagttctaacgatttaaaatcgtttggaactgaggccttttttgattggtggaaacgtgctcttgtttgcaataacttccgcttaatctaaaaatcccgttaatcctaaaacctggattaacgggatttttttattaatgctcaattgttgaccgcaaccaatagcactctattttgttgattctcttgctacgatactgtatggcaataggattgtcttgtcgtttacgtcttctttgttcatcatctttgttaaaagccgcattgctacggcacccatatcatacaatggttgtgagattgacgtcatcttaggacgtaccatttcagttaacttcgtgttgttacttgtcacaacttcgaattcagctgggatttgaacgccggcatcaactgccccgttcaagacaccaactgccaattcgtcatcactgacaacagcagctgttgccccagttgttttgattttgctgaacaatgcttcaccagcactgtagctgtattctgtttcaaaaattaaactttcgtcataagcaatgcctgcttcattcaaggcatccttgtaaccgcataaacgatacttgctgttaattgggaatttcaagctaccacaaacgaacgccactttgtcatgaccatttttgattaacttcaaagttgcatctttaacagcggcaacgtaatcgatgttaacactacccacttgttcgtctggatcaattgaaccagctaacacgattggtgtctttgaacgtgagaattcagcgcggatttcgtctgaaatactgtggcccatgtagattaaaccgtcaacttgttttgccaataaggtattcaacacttgaacttccttttggttgttttcatctgagttagccaaaataatgttgtacttgtacattgtcgcaacatcgtcaatcccacgagcaagtgatgcaaaatagatgtcactaacgtcgggaatgatgaccccaaccgttgttgtcttcttgcttgctaatccacgggccaccgcatttggacggtagtcaagacggttaataacttcaagaaccttcttacgtgttgcgggtttcacattcgggttaccattgacaactcgtgagacagttgccattgaaacgtcggcttcgcgcgcaacgtcataaattgtaattgtttgtttttccatgattaactgattcctttcatttgtaaaataaaatagattatattttcagcagttttcattttacttcttgattaatttaacagagatttaaagcaaatgcaagcggtttacactaattttcatgaaatttacatttttgttttcatttgtggtttacattaccgtttacattggttgtgatatactagtgatatcaattgtaaaggaagtgctttagatgaataatcaattagcccaattacaaaattggcttggtgagaataatatggatgtggcttacatcagtaatccaaccaacatcctctatttcactggtttcgaaagtgatcctgcagaacgggtcttagccctctttgtttttgcagatcaggacccattcctatttacaccacaattagaagttgaatctgctaaaaaagctggctggaaactcgacgtttacggctatctcgatcacgaagatccatacgcaatcatcgcagatcaaatcaagaaacggaatgcgaaccctacacgttgggcacttgaaaaagacgaccttcctgttcaacgttacgaagccattctaaagcaattcccagacgcaacattcccaggcgacgcttcacgtttcatggaaaacttaaaattaattaaaacacctgaagaaatcgctttaatggaagcagccggccgtgaagccgattatgctttcgaagttggtttcaatgccttaaaagcaggtaaaacagaacaagatatcgttgcagaaatcgaatacgcattaatgcgcaaaggcgttatgcatatgagttttgataccatcgtacaatcaggtatcaacgcagctaacccccatggtggccccgaagccaacattttaaccccagatgccctcgtgctctttgaccttgggacattgcataagggttacatgagtgatgcgacgcggaccgttgcttttggcaaacccgatgcgaaatcactcgaaatccacaaagtctgtcttgaagcaaacttaactgcccaagcagcaatcaaacccggtatcacagcggctgaattagataagattgcacgtgacgtcatcactaaagcgggctacggcgaatacttcatccaccgtctaggtcacggcattggaacttcagaacacgaattcccatcaatcatggaaggcaacgacatgattatcaagccaggcatgtgtttctcaatcgaaccaggaatctacatcccaggcgttgccggtgttcgaattgaagactgtgtccacgtaacagaaacaggatcagaagccttcacacacatgacaaaagaactacaaacattctaagagtgctgattcaaacgggttggctttgaggattaacttaaaaacgcggattatgacgcttttcgtcatgattcgcgttttttggttaaccggaaaaggcagtttgaaacagcacgtttcaataagagtgcccttaattgcggtcagcaactgagcactaattaaaaaaggcagacgaaatcacaaaatgatttcgcctgccttttgttttaaagaactttataatccctagtcgttaaccattcaaactatgttacagtaatcctaacagtaagtttatgacggtggctaacgctcagaaatgaggtgatgcctatgttgattaagcgttaccttgagaaaggataacatgtcggttttcaacgcactgatgttggcaatttcggttgccatgttagttattgagattctgaaatttaatcaaaaaaaataaccgtctaaactttgacgagtcacggttattttttaccaaaaacttgccaccgtcttaagcggactgtggagaagagtcgtgttgtcgcacggctctttttctatgttttcattataacaccgacttttaaaatttgcactagtcgtcaattcaaacaagcaaaaaagcccccgctaaatcaggcttggcaggggctttttcattgattatttatcgtcagtgacttcttcttgaatagtttcaacagcggcggatgcttcgtctttggcttggccaaatgcactcttgccgtcgatcacgatatcgtcgaaatcttcttggctagcttcaaggctgccgccaaattgtgatttcaagtctgctgttttttcatcaaattgtgcttttgcttgttctttgatatcagacgcattgtcttgccaatcacttgcataatcatggacgcgattcatgtgtagctttgcgtcgtcttttaagtctgctgctgtttcacttgctaaatagtagtagtcttgtgcgcgatccattaaatcatcacctaagtccactaattttgattgtaattccttacccgtcttaggagttaacattaatgttgcaccaatggctgctgcgccaccgactaatacacctaatagaaaatgtcctttttttgccatgagaattactccttatcctttgtttgacgtcgattttggtaaaatcttaatgcacttgcgccaaccttcgaagcgaccgttgccttagcggttgtccgcccaacgttggtaacatgttccgttaaattgcgacttgccgtattcaaacttgaaacgctctcgccaagttcgccagccgctctgaaaacaggatccaagtcagcgactttcccgttcacatcgtctagcaatacgttggctttgctgagtaaaccttctacttctttagataaaatatcaacattctcagtaacaaccgtgacactcttgttggcttccgttactgtcttagaaacatccgttaatacttttgtgacttttaatagcatcactattagaaaaacaactaggaccgcaaaagcccctgcggcgattagcgccgcaatttgaccacccgtcattgatttgttcctcctacttcgttatctattacattgcctcttaaagactagaatagcattatttcccttaaccttcaattatcttcactatattaggtgccattttttctgacatttgctaaactaaagacatgctacaaaaaaggagtttcacgcatgttcacacgtttattagcggccgcaccaactccggtcgaatctgttcagaaacagaccaatatttttatgcgctacatcacttcaattgactgggataaattactcagcaccctcgttgctggattgtttcaaattatcctactctccgctttattctacctcatcaatcgcttaggtaaatacatcattaagcgcagcttcagaaaataccgcaaaactgatggtttctcaagtaaccgcatgaacaccatttatactttgatggtcaacgctttttcatacctcgtgattttcttctatctctatgcgctactcagcgttctcggcgttcctgttggtaccttgattgccggcgctgggatcttcagtttagccattgggttaggcgcacaaggtttcgtcaacgacatcgttaccggttttttcatcctcgcagaacaacaattcgatgtgggtgatatggttaaaattggtacggtagaaggcaccgtcaacgcgattggcttacgaaccacacaagttcaaagttacgatggcaccttaaatttcattcctaaccgcaatatctcgatcgtcagcaacctatcccgcaatgatatgcgtgttctgattaacattcgcatcttacccgacaccgacttacaactgttagcggcaaccgtcaatgaagtcaatgtgcaactggtgcccaaacatcctgaaatacaagatggccctacgattctcggggtaaccaccctcgcagatggtgtccttgcttaccagattgttatgcacaccactaacggcgaacaagctgccactaaccgtactttcttacaggcttacttgcaagccttgaatgaagctggtgtcccattaccttcaacacccgttacaattcccaccaaataaaagtcccctcatataaaaaggagaaccgcttatgccacttattaacgcactcaaaggcgccctaatcggcgtcgcactcgtaatacctggtctatccggcagcattttcgccgttatcgttggtctatacgaaccgcttctggcggctatcgcgcaattcaaaaaagattggcgccaagcaattggctttttatggccaatcgggattggcgctgggatcggcgtcttactctccaccaaaatcattctttggttatgcaccgcttatccactagcggcatacagtttcttcatcggtcttgtcgtcggcagtctcccattcatctggcgtagactcgccggactcaactggcaaaaagtgttaatcgccatcgtctgtggcgcaattatgctactactcacccagattggtggtcaccaatctgaatccgacatcgctatcaaacaactcactaccctccaagactttggcacgttactatttgccggcttcttctcagtatcactcatgctcatcccaggcgtctctgggtcaatcatgctcatgattgtgaagcaatatggcactgtttatcacgctgtcagtcaactactcgacttaatggtctacctcgtcacaggacgcttgacacaagccacagaagcgttcaaaagcgtcgcgctcctcttaccgttcatcattggggccgtcatcggaactgtgattgttgctaaattaatgcactacctattagcacacttcgtcgaatacgtttacgccggtgtgctcggcgttgtcattgccgccatctggattcttgcccaaaccggcgtcgcaccagcctggccagccctaacaaccgccacagcactactaggacccatcgcactcatcatcgctatgatcatcctaggcacaatcgcaacaatctacttcgacaaagcatagagtgctgttaaagcgatttgcctctgagtattaattaaaaatgagcctcaatctcgtcttttgagattaaggctcattttagattaagcggaaggtgttgcaattaaaaagcacgtttccacaaaaaaactatccacacccttcccaatcaggttgtggatagtttttatttattatagtgctttaatcgctctaagatgttcaatggattgaagtcaatatttgagacagattttaagagacattcagaaccgcgtttaccttccacagctcaaataaatcattaatcgcgattaataacttatttgaaccctggaaagcattaaatcaggcggccatttggctcgtaagtgttgcaatttcaacttgtaagggggtctggtagctcagtgaactatgaattctcttcctattgtagaaagcatgcacatattcaaaaaggacggcagcggcagtttcataatcttcaaagaccggcactggataaacacattcctttttgaggaaagcgtgaaaggattccattggcgcattatcatacggataacccttacggctgtatgagtggcggatatgtagctcagttaaacgttgattgtaatcatcgctggtatactgtgatcctaaatccgtatggataatcaggtccccagtaatggttcgatttttaaccgcgctttcaagggtctttaagactaaatcagtagccatcttttttgagaacgaatagccgataatccgtcgtgagtgcaggtccatgatggttgataagtaacaccagccattacgcttcgtttgaatataggtcatatcagcggtccatttttgatttaaaccagtggtcgagaaatcctgcttaagcaagttgggacgctgttcaaccttggttttggaagccgaagccgctttccacttattgacggtaacggagtggctatccagttccttcatgagccgggaaatccgtcgtggactgcaccgaagctgcagtggttgaagttccagattcaattcatggtggatcttcataacaccgtatcgctgcttaaattccgcaaagatccgcagaatccgttgtttcaagcccgcatcttcggcccggcgttttgaaggtttgggggatcgataacgataatactgagctctggaaacaccgaggattcggcacatcttggttacctggtggtgatggctttcttggtgaatgtaatcaaagatattggttacttctgcgcaaggaagcccagggctttttttaggatttcgttctcctcagacagcgaagccagtcgcttttccatcgctttgattttgtctggcgatttaccggattgagttttggcctggccttggatccacttatgaactgttgaatagccaatgccatattctctggccagttgggcagctgattcgccttgcttatataggttgataatgttttgtttgaattctttgtcgtaacgagttggcatgtaaaaattccttccttttgagagatgatttattcattataccctctcttaaaagttgtctcaggaatcagcttacatccagttagctacatcttcaatcgttgtaacgttgttttgaccagataaaggaatcgaaaagtctggatattcactgcccggatcagtcaaatctgaaagccagtatcgtgattgaataatcaccgatttactcgtggtcgatttaacgctttcctttttctcagaaatacttgaactcgattctgaatcagaactctttgaactcgacttactatctgagcttgttgaagcactgcttgtcgattgtgattgcaacgaactggctaagctttcagaaactgagctcgcgccttcaattgcgcttcgtgggttcacaatcttagaagtcgtgttggctgtcaccgtctccttattcacagccaccgctaatgcgctaccaaatgactgtacgattgtagtggttaagaaaataattgctaaaattagatggacgactctcttttgcatatcaaatttcctcccagttctaatgcctttaaaactttgttacatgataatttttcgatattttgactatgttcatcaggcataactttgacggtatcactacttccccctaggctagactcccaagaatgcctatgcaggggtgaatattagtcatctaaccatcattacccaagaacaatatgtaacgatataagaggttcacaactcatgagttatgacctactatcatggattttttaaagtcattacgtctaacttaattttgcttacaaatgttgatataccagtaattaagctggattcagtccaaaacaaaaagcgtcttccaaacattattcgttggtgtctggaagacgcttttttaacccttattgtcctttttgggttgtttctgcggttattggctcgatttggtattctttttcgatattatgggctactcggttgaagcttttcatcatttcgcgccgggtaacaatccctgtgaactccccttcatccgaaatcacaggcagataggggtgatcaactaagagatggagcgtttcttcaatatcatatggatctctaatcgtcacgacatcggtttgcatgacatctttaacggtcagcttccgcaaattttcgaaactgaggttattcaatccgagcatcgtctcggtaattaacggcatcgtcaacatccctttgaacttcgaatggttgtctaagacgggaatgctcgaatatttcaccgtggttagtagaataaacgcatgttccaaggagttgctttcttgaacactcgcaacaacctcaccgggaattaagaagtgttctttattttctaataataagttcgaaaatgcatctgaaatcatcacttggcctccaataaactaatgctacttttagattgtaacaaagagcaaacacaaaagaccatccatagctactaaactttggatagtctttagaattaggcgcgtttaaatgtaaagtgtaactgcgaaacgggttcgaaccgacgattgtagtactggatttgatattggtcaggtgtgacgtctacaacggcgtatgtccctttcaagtcacggaactgcccccgtggttgggcaatgctgccagggttcaagagcagcacaccttcgtgcatttcacaggccaattggtgtgtatgcccatagaacgcgagattagcttggctttcttgggccgctaataaaagccgcattaaatcgccatttacaccatacaagtgcccgtgcgttaagaagattcgttcatttgcaactgggacaacaacttgtgctggaaattgaccattgaaatccatattgccttgcacaatggtcatttggttaaacaagggatcatcggttgttaattcagaatccccgcaatgtaacatggttactggttgatcttgatactgcgccactaactgcacgagaatatcgcgatcaccatgactatcactcacaacaacaaaacgcatactaaacagtcctttcggcgccaaggggcgttgtttttttgaaacgtgcttcttccgacatattcttccggctagctacatcagccaaatctaaacgtgatcctgccgtcgcacgctagtctttgatccattctttccatttatcttctaggttctcaattgcttttgcgcggtggctgattttatttttttgttccaccgtgagttgggccatcgttgcatctaattctggcacgtagaaaagtgggtcatagccgaagccgttatccccacgaggaatacctagaatttggcccttcacgttaccttcaacgactaaatcttcatctggtcggtctggtttagcaaaaaccaatgttgtatggaaggttgcggtccgcttttcagcaggcacacccgttaattcatagagcaacttcgcgttgttgccggcatcgttatgatcaccagagaagcgtgcagaataaattcctggacgaccacctagttcatcaaccattagaccagaatcatctgccaagacaggtaagtgtaagatcgctgcaatttgatccgcctttaggcgagcattttcttcaaatgtcgaaccagtttcatcaatgtttggcaattctgggtaatctaataatgttttgatttgaatcccttccgctgcgaagacggattcgaattcgcgggccttacctggattcttcgtggcaatcacgattgtttgttcatcggtatcagccacttggatattcggttgaacggcgcgttcaaaactggcttgacgttgatcattggttcgcgtcacaccttggctcgcacgtaaaataagttcgttgaattcactactattgactgcttgttgtccgccgagttcaagggcgatgatttgttcctgcggtgtggccaccatcgtcaccaagctagtcgctaggtcgctttccgcggcgtctgggtcaccgagtgactcaccagcgaccatcgctgctgtgacggctgcagcgacttgtttggggcctttgccttttggtaataaggttagtgcgcaataaacagcgttgaagagttctgctaataagccgccaccatcttcaagacaggttacggtgatagtgagtgcttcggttgccaataaggggcgtaatgtcgtttgcaaccattctaattggtgcgctgttatgccattgccattgacttgcaaggaaccttctgtaggttgaacagcagcgagcactttggtatcaccgcgttgccatagaacagaagcgggttgttgctttagaaaacgccaagtgacttgcactggccgtaaatcattatcagcacgattattcattcggaccatcgtttttttcctccttaatgataacttgttgggcttcaagggttgggattgctaaccattgacgcgcgattgcttcgaaattggttacagatccggtcgtataggtgtgtagttgcccagctgttgcatcggccaccaactgattgcgatcttgtaatgcctgaatcaaactatcaacagcggcatgcgcggggtcaaccagcgtgactgccggtccaactgtcttttgaatcgccgcggttaataatgggaagtgggtacagccgagaattagcgtatcaattcccgtcccgcttaatggcgcgagggtttcgtcaaccgtgttttgcacagtttcgccactcaattggtttgcttcaatcatcggtacaaaagttggcgcagccaaactcgtgacgtgtgtcgccggtttgagtgcctttagttgataggcatatgcgccactgttaatcgttccggtcgtggcaattaccccgacatgccgattacgggtcgttgccaatgccgcttggctacctggtgcaatcacaccgattacaggaatcgtcaattgcgcttgtaaatcaggtaaggcggccgccgttgcggtattacaggcgacaaccaatgctttaatattttgcccccgtagaaaattggtcatctgccacgcaaatttgcgcacggtttccgccggcttttcaccatatggtaggcgcgcttgatccccgataaagaccatgtcttcgttgggtagacgtttaagcgcctcttttaagagggttaggccccccacacctgaatccataaaaccaatgggttgtttttgcatattagatttctcttttcatttcaggatacactcgtaacttctattttctcttttttcggtgcaaaattcaactaaaacaacgggcacggccggcaattcacagttggcgttaatttttataaaaaataaagagttttcgcggtataataggagtacttataaaaaacgaaccataaaggagtgccactgtgactcaatcacgctatgaacaactcgcccaaaatccacaaactgcatcatatctgacacaggcaacattacgggatatcttgttaccatcaattcttggggccgaaaatgatgccatcagctattgggccggtaagcaactcgctttgcaattcccactcgattctttcgaagacctctgtgccttcttcgaacaaatcaacttcggccatctcagtcttaagaaacagaagaaggaacaatacttcttcgaattaacaggcccgattgtcgcttcacggattgcggatttcgatactcctgacttccaattagaagccggcttcattgcccaaatcctcgaacaacaattgcggattgtgactgaagccaaagcaaccattgaaaataaaaaaaacgtaacgattttcgtccaaacagattcaaaagcaccaattgaagacgaagcagtcgaagccattcatttaacggttgatgcatcacaagtcgcatctgtaccaagtgaatcagaatctgttgaagaagaaccagcacctgtgatgacacaacctgttgaagcagcccctgaagaagtggctgctcccacactagaaccagaatccgttccagaaacaccagttgttcctgaaccggtggaaccagaaaacaagccaacttctgaagaaacaccacactacacaagaacccgcgtggcagacttaccaagtcgacgagaaatgcatagaaaacacagataagcatgtgctataaaaaaagggtaggaacaaaattaaattttgttcctaccctttttgaatacttagcatattaaacgtgttaatcctcaagtgataaccggctctgtctcactctaatctaaacgtgttccttgagccatctctttccggttaaccccgaacgtcaaatgattgcttcgctatcattcaccgttctgtgttaatcctcaagtgataaccggctctgtctcactctaatcaaagtcatggacgttattgccgctgacgttttgccagtcgcgacttaagaagtcgtttgacatgtcatagtgcactgcttttgcttttttcgttctcatgaatggttggagtttttgatcaactttcaaccagccacgccagccaagatgaatcgtatcttgcatgaagaattgttcattaccgtcgttagtcatatcaacaatgttgttgaagccttgcgttctcaattgatattgaatcttcttatcaaaacgattcaacatcgcttgtgagagccctgtataagcggcccaacgcgcattaacgggtggaatgatgaattgaacagatactttatgggctgcgaagtagtctaacatcaattggaaatcagcaaactcaggtgaactttcatagttaaagtgactttgttcacccttcaatttaccaacattgggtttaacccgttttttgtaaaaactattttgaatgccaaacggattatcacccgttactttttgtcctaattccgttgcgacttgatcaagttgcatgttatcaggttgttttggtaacaccttcaagcctttacgcaattcgcgttcacgaccccgaatgaataattggctgaagagttgatcttgatgttgtaacgctgggcgtttcacattattaatgtatactttttgcgtctccgttaaaggtatgcctaaagctttgttcttcaatgcatcccgcattaccccgttggttgtatcacttgtgagttctagaattcgtttcgctgcataccgcgtactttcagaatccttcgcgtggattaagaaataactggtttgtagtggtgaatagaagaaatcgaacatctcaggttttaccccttgtggtacaaaccattgtggcgaaataacgacgacggcctttttaccgttcaagtgattaccagtcgcttgaagtgataaaaagtgggtcaatgactgagtccctggtgcccctagtaggaatggcttattttgccaatcatacttgtttgccataacagatggatgtaacgcgtccattcgggatagttcggatgaaccaatcatcggaatgtagttgtcgttaaatgcagcatctttgatggcttccccttttagcacattggcggataatgacgtcgccgctgtcgacaacgtcttttcgctaggtcgtcctaatcgaagaggtgatagtaataaggctgttaagcagagaccggccactaaaaccgggccgaaaatttgccataaacgtttaaacattttattgcaattcctttacgcgagcaatgatcttgttaggtgttgaccatgcttcacgatcgaattctgaaacaggtacttcaatatctaattggccttgtaattcaagtaacatttgcacagttgccattgaatctaatgtccctgattcgaataattccatatccatatcgtctttaatatcgtcgttccctgttaaatctgctaaaatttctactactgtattttctacgtccatgattaaatcgctcctttagtgtgtaggtcttagtggaaccataaccggtccaaaaagcctgagaaaattagaaaactgagacaaacggtgttaaacgttgcaaaaattgctaagtagttcgtccaccgattgctgataatgtgatccttgtgtttcttcttgaaacgcaaccagacatcggtaaggatgatccagatagcgtggaacaagccgtaaacaatgtagtaccatgttaacccatgccagaagcccatcaataagaagagtgttaaatagccgagattggcaatgaggaccttgttcttggtaatcttatgtttcatcaagaagaacactaagcgcatgtagatgtaatctctaaaccagaatgataatgtcatatgccatctattccagaattccttgatattggttgatgcaaatggcttgttaaagttaattggcgtttcaacacccatcacataacttgtcgcaacagcgaataaactgtagcccgcaaaatcgaagaataaatacatactgtaaacatacatgtaaccaacaagcccccatgagatatcaaggaacccaccgcgactcgccattgctaaatgcgcaactttagggagtaacacggtcccgaataagtaaccgagcataaacttatacacaaagcccaacatgaagttgtggactgccttgcccagtaagtcgagataatggtcacgatcaggaacttttaggtaatcttttttgaaacgacgataacggtcaattggtcctgatgaaatcgtcgggaaaaatagcataaattgtaagaataaccatggttcaaatttcttaatactgccatcacgggtttccataatcatcccaactgacttaaatgtcagataactgatccccaagaagccaagaattgaattactacccggatttaagaatggcacgaacttgacaatcactagcggcataatcgctaagataacagccagatcgaatagccaggtgttgttgtgcttttgacgatagacagtgtatccccaaatcagtgctccttcgaacaggacataaccaatcaaggcaattccctggtgaaccttatccccgtcaaagattaggatcaaaaagagcagtgagacaagtgtctcataaacatgccaacgtttgccgttaagtaagccaatcactaacggaattaacgccgcacctagaatgagaaagtagttcggattcgcgtacggttgtaaattaagcattgccattaacctctttaatcaacgctttacgatcaatcttcccattgacggataatggtaatttttcttgataaacaaatcgttgcggaatcatatagtccatcgtattttcagcgagttctgcttttaacgtcttcgttaaatcattgcccgcttcttgaccgtctgctggcacaacataggcaatcaattgggtgacttgatgggctttgttgtagcgcggtacagtacatgcttgatgaacggctgctaattggcttaagtgatgatcgatttcctctagttcaatccggtaaccgtgcatcttaacttggaagtcggtccgccctttataaaagagcaagccatcttcgttttgggtgaccaaatcgcctgaatggtagaaacgttgcccgtctttttcgaagaaggctgcagctgttttttcaggattattcaagtacccttttgaaacacttgggccactgattaagagttcaccaggttggccaactgcgactggattattttgttcgtccactacgacagtttgagtatcagcctttgtgtagccgattggtagtcggtcgtaagtcgctaagacctccgccgtaatttcgatgctggtcatcgcaaccgttgcttcggttggaccgtaagtattgaagatttgcgcatcaccgaaacgttcgattaacttcgttgctgtttgatgcgttaattcttccccacagaagacgaattgttttaattctgggaaatgttcactatcaaatgttggtgataataagcagatttctgcaaaagatggtgttgaaacccattcgttcaccttaagagttggcaagacttcaaataacgtcttgaagttgtccgtcacagctttttctaaaacgacgagggttgcacctgagcataacccgggaaataaatccatgactgataaatcgaatgagtatggggcctgaattagaacgcggctgttatccgcaacgttgaaagctgggttggcccagtcaacgaaactttgtaaattgctttcgctgatttggacgcctttaggtaaccctgttgtccctgacgtgaagatgatgtagaaattctcattcccttgcacactttggctagcatcataatcggttgctccgtttgcaatcacatctgtcaattgggtttctgcgaaaacgggcatattaacatcaattgttgtttcactagcccatgataggacagcagccggcgttgcgactgattcaatctgtttaatccgcgctggatctgaatgttgttccactggaatataagaatggcctgctttaacagcacctagaaaagttgccaccatctcgaagttttgaccaccgaagataatcaccggtgctttagctggcaagtcttggctttgaatgaaatgagcaatccggtctgaagcagcctttaagtcggcgtaagtgtgttgcgccgtgcctaattgataagccacagtttgtggttggtcaattgcaattgcatcaatttgttgaatgatattctttttcattttaacgacgctccttcattagaattcattgtagataaatttaggactaccgataccactgtaatcatataaataaagtagaattagcagaataacaaaataaattatggttttgccaatgaaattgacggccggtttattccaaaaattaagtattttttgacccattttttcaccatctctttctctctctttttgattttcatcattttgttcatcattaaagttaccacaacgtttattaaacaaccactaacatttttgtcacacgctgtcacataaaaaaagcacctactgaatagtaggtgttttcataattagtcggtatattgtgccaaaatcgtttctagttgttccttattatggaagccagtaattttttcaacaacttgaccatcttttttaaccactaacgttggaatcgccataattccgaaattagcaggcgtttctggattagcatccacatccattttactgaacttaactttgtcgttagtttctgccaatgattcgataacaggtgattgcatccgacaaggaccacaccaagttgcccagaagtctgtcaagacaacgccactctttgtttcttcttcgtaatttttatctgtcaatacttcaaccattattcttcgccctccattcaattgtacaaaacatattattttttataatactcctatatggcgtaaataacaacttaactcgcttattattcgttacaaacggactatttcatccccgtttaatttaacaagcctaaaaaaacactcccactcaaaaccagaaaggactggttggattgggggcgtaaacgtgctccagcaggcatactcctccggttagctacaccagccacacgaccaacaagttggtcattcggctgcctatgctaatcctcggcgtataactgcctgcttccgcactctatttgaatgttacgattgttgcgccattaccgcctgcgtttgctggggcgtattcgtattttttgacttggcgattgccttttaggtagtcctggacaccttggcggattgcaccggtgccttttccatggacgattgtcacttgttggtagttcgctaacaaggccgcatcgacatattgatcgacttcagccattgcttcttcgtagcgtttgccccgcaaatcaagttgggctttaacatgccgcgctccaccgctgttgacagttgtcacgtgtcgttgaggtcgattatcttcaacgactttttgtttctcgaggtcttcattagcaatcttcatcttgataatgcccatttgaacttcccagttcttggcatcgatttgccggactaatgtcccacgttgaccgtatgaagtaactaaaacatcatcgccttctttaagggtttgacgtcgttttgcccgttgcaatactttgtttttcttcaaggttgtttcttggtgcaattgccctaattccgacttcgcatcgattaattgattttccttaatctgggcgccttgattcatctgcatatcccgcaacttggtgatcactttgtctgctttaacttcagctttttcgacgattgcattcgctttttctttcgccttcgtcatttctgtttcacggtcttcgaagaattgttgataagcgttggataactgttgatgtaaatcagtggcttctgataattcatggcgcaaggcttggtattccgtttcggctgccttacgttgattttcgagatcggtaatcatattgtttaaatcttggctttcatcgttcatcaattgtttggcttgttggacgattgtacttggtaaaccaagtcgtgttgaaatatcgaacgcattactacgaccaggcaccccaattaataaacggtacgttggttgtaaggtagcaatatcgaattccatgctagcattaatcgtttgtggccgattgtaaccgtaaattttcaattctggataatgggttgaagcaacgacatcagcgccaacaatcccaatttgatccaagatagcgatggctaaagccgccccttcttgtggatcagtccctgcccccaattcatcgagcaagaccaaactacgatcatcgatatgttgaagaatctgaatgatattttccatgtgcgctgagaacgtactcaagttctgttcaattgattgttcatcaccaatatcagcaaaaatatccgagaagacgccgacttggctctcttcacgcgcagtgataaataaaccagattgtgccatcacttggactaagcccaatgttttcaacgtgatggttttcccaccggtattgggacccgtaacaacgatggcctgataatccgccccaatcgcgatgtcattagcaacgactttagctgggtcgattaatgggtgccgtgcttgtttgagttcaacatggttttctaaattaatcagcggttcagtggccttcaacgctttagcaagttgagccttagcattgacaaaatcgagttgccccaataattcagcgttggctaaaatattgtggcgttctggcatgatggcttccgataattccgccaaaatccgttcaatttcttgttgttcttcaatttgtaattggcgcaagcggttattcaattccatgagggcttgtggttccatgaaaagggtctgaccactagcactctgatcatgcacaacgccgccgaattggccacggtattcttgcttaacaggaatgacatagcggtcattccgaatcgtgacaatcgaatcactcagatatttagctttagcaccatgtgtataacttgccatccgcgatctgatttggccttccaattgttttaaactagtccgtaagccacgcaacttggttgaagccgtgtctaaaacggcgccatcatcagcaacagaacttctaatcttttcagttagttgcggtaaagtcaccaattgggcaactaagtctggcaacgcctttaaggttaattcatctttttctaagtcatcaaagaaacgcacaaccgcagaagtcgcacgtaaaacccgcccaacttgcgcgagttcggtaccgtttaaagtcgcaccgatttcgattcgtttcaggtgcggacgaatattatctaactgtggcaaaggaatgccaccttttagccgttcaatatcgaccccatctttggtctggtccaagcgttcttgaatcaattccgcatcgttagcgggggttaattgtgtgatttgttcttgaccaaacgccgtgatggcatggccttgaagcatttgtttaattttatcgtattctagtgtttgtaatattttatgattcatttaagttagctccttctaaaaaaggggcgacttccgtcagccccaactgcactatccattttagccagcaatccaccagctcgtcacttgagaggtgaggactggtgtgtgtaagacaatgacgcgcgcaactgtcgagttttccaatgtcttctgtaagccatcgactggcactaaagccagcacgtagaggagcaaaaagagccccacgtaaacgaccaagaaactcaaaagtccaccggctaccttgttaaattgcttcaaacctggcatataagtcaatgaattcaacaatagtccgatgaagcgcaccaacaagccaccgataaacatcacgaggacaaaggcgacgccgatataaaacgcatcatcgagtgataacccgatactcttttggaaaaatgcaaaatagctgtcttcagttgccgatgggtatggcaccattaaacttagcttaggccctagtgtttggctcatcgctttggcaatccaaaagacgataaagtagccaatcgtgtagacggcttgcatgataaacccccgtctgacccctgtgtaaatggcatataacagcattaagataataattagacttaacatgagttccccttagatacgcgttttgtggcgcggatgtgtgtatgattgattggataaagtattctgaaacgtgctccataagccatcttcttccggttagctacgcctcgcaaacaatcgacttcgtcgcttattcacgagtctatgctaatcctcagaagatacccagcttattgcgcactctgatttttgaaacgtgctcttgcaggcatatttctgcgcttaaccaaatttgccaaatcggcgattgcatcgccaattcgtcaaatccagttaatactcaaaatataaccgcctgctgtcgcactctttttttaacgtactcctgcagatatactcttccggttagtttcataccgcaaacgatcggccttgccggtcattcacggtatgcaactaaccctcagagtatgaccatctgcagtcgcactctaattttatttgctagttcaactgaactattttatcatgaaataagggaaagtggcaattttactccgaatctcttcatttgccactcattaaggagccaatcgtatgcaagcagtcattaaagtgacaccctcacaattaactactattcaaaaaaattatccaaccaaccgtcaactaccgccgggggccgtttttgcgcaccaagccaatggactaagcattaccggctataaatctggcaaagtacttttccaaggcgctagtgccgaacgagaagctgctaagtggggcaccgctacccctagcaaagcaaaatctgctagccgtactaagcctaaagccgccaaaggcgatgttttaccagctgattttgccaaatggtccgttttaggctcagatgaagttggtaacggaagctacttcggtccgctgaccatcgccgccgtctatgtcagccaagaaaatctggcgttcgtcaatagtctaggcgtcgcggattccaaaacgctaaccgatgcacaaatcgatcagatggcaatcaagatgatggctaaactcccctatcacatcgtcaacatcatgccaccgaaatacaatgaagtacacgccacaatgaacatcgaaaaaatgaaggccatcagccataatttcgcactcctcaaagtcctccaaaaaatccaacccgaaaaacccgctggcatcctcattgatcaattcgaaccacgcggcatttactacaactatttgaagaatgaaccggttgttttacgcgagaacgtttatttctcaaccaaggcggaacaatttcacctcgccgttgctgccgcttcaatcattgcgcgccaccaagccaacctatcaatgcttgaactgtctaaaaaagcgggccgccaaattccgctcggcaatcatcaagcagttaaccaaatcgccgcagatttactcgcacaaggtggcatcgattacctaggcgaattcgctaaattgcattttattaacacggaaaaagcgaaaaaattattatagagtgcgtttaaagcgggttgactctgagcattagcacagtgttgtgaatgaccgacaaagtcggtcgtttgcaatacgaagctaagcacaagagtcagctttaaaaagcacgtttcaacccacaccttctccacataaaaaaagggtcccgactgcaatttaattaattgctatcgggaccctttttgaaatagatggtgataacgtgctttcatcaacaacttcctgtgctttgctacacttatcaaatcggcgattgcatcgccaattcgctaagttaggcaaatgctcagaagttccccgttgatgacgcacttcttttctttaacgtgcttttcaaaccatacttctgcggctagctacgtcccgcaaacgatcgacttcgtcgctcattcacgggactatgctagtcctcaaagtataaccggtttgaacgcacttatttcatgttgtcgtctgccaaaaatgtgtttagtacttcttcaaccatttcccattcttcgtcgtcttcgattgggaataggtcacctttgctggcatcgcctgcatcgtctgatgtgaatgagaaagcttggatatcaacttcttcatcttctccagcgcttgttgggtacaatagcacgtatgatttaccgtaatcttctgaatcaaatgtaaagagcacttggtataattcctcgttaccttggtcgtcgattagtgtaatttgttgttcttcatcttggtggatgttcttgttatcttcagtcattcatcaaaactccttaattgttttatttattagccttgtgttaagcgaccgtgcgcgtccaagtagttctgcaaaatcatcaccgcagcaagcttatcaatcacttgcttccgtttcttacgtgacgtatctgcttgttccactaacatgcgttcagcctgaaccgttgttaggcgttcatcgatgtaatcaaccggaatctctgggaaaagttcactcagcattgccccgtattcttgcgctttaagcgcccgtggcccaatcgaattattcatattcttgggtaaccccaaaacaaaaccagtcacttgatgttctgcaaccaattccttgacgcggtctaacccaaattctgattcatcttcattgatgcgaataatctcgaccccttgagctgtccagcccaatagatcactaatcgcaatgccaaccgttcttgatcctacatcaaatcccattaagcgcattatttcgtcgtttccttatccaaataatttttaactaattcctcgataatctcatcacgttcgtgcttgcgaattaaattacgagcatcattatagcgcggaatgtatgctggatcaccggacaacagataacctacaatctgattaattgggttgtagcccttctcttctaatgtctgatagaccgtcgttaatgtttcatgaacattcttggggctatttttaccaaaatcaaaatggactgttttatctagattcatctctcaacacctcaacttttcgctacttatacaaccatattctactcgaaaacaggacaaagtacaactctcccctctcttagcagaatgcggatgagagataactataacacatttcgctaaattgattaacaaaaagaacaaaaaaataacgggattgcaatcaataaaaaattgacgacaatcccgttataagttaagcgttcgctaaagctgttttagcagctgccaaagcatctgcgatcccagctggattcttcccaccagcttgggccatgtctggacggccaccaccgccaccaccaacgagtggtgcgatttgtttaatcaaatcaccggctttaatccccgctttaatcgcatcaggtgcgaccgcgacaatcaagctaaccttatctcccgcaactgttgcgagcactaagacatctgaaatttgtttttgttgccattgatccgctaattgtcgtaattcgttcattccggcaacttttgcatcagcagccactaagcgccattgaccaactgtttcgacattttcaaaaacattgccagcttgttgttgggcaaattttgctttgagttgttcgttttctttttgttctgcttttaagtcagattgtaattgttgaatcttcttaggtaaatccttggtttgagcaactttcaattcaccagctaattcatttaacaaggcttgtttgtcattcaaatacttgaaggctgcctttgaagtcacggcttcaatccggcgcgtcccggcaccaatcccagattcgctcgtaatcttgaatagaccaagatcagcagtgttagcagcatgcgtcccaccacaaagttccattgagtaatcaccgatttgaaccactcggactgtcttaccatatttttcggtaaagagtgcgatggcccccatttgtttagctgtttcaatatcggtttcaacagtattcacaggtagtgcagcccaaattttttcgttcacaattttttccacagtggctaattgatctggtgtgacttgaccgaggttcgtaaaatcaaaccgtaagtagtcaggttcaaccaatgaaccagcttgatgcgtatgttcgcctaaaacatcacgcaaggcttgatccaataaatgcgttgcggtgtgattcttaatgacgccaccgcggaaggttggatcaactgataagacatagtggacaccactaatcatttcttcgagcacttcaacggtgtgtaatggttgcccgtttggtgcgtattgcacgtcagtcactttagcgactacttgcccagctaggttcttaatgatcccttgatcagcaacttggccccccatttcagcatagaatggtgtttggtcgaagattaattgcgccgtaccactcttaatcgtttgttgttcggcattatcttgtaagatgacgcttaacttactttctgtttcaagcgttgtataaccagtgaaggtactttccactttgatatccattaaaagttcgttttgcatccccattgattgttcatcactacgggcattacgtgcacgtgatttttgttgtgccatttcactttcgaaaccagcttgatcaaccgttaagccttcatcttcggcatattcagttgtcaattcgattgggaaaccatacgtatcaaataacttgaaagcatctgccccagcaatttcactttgaccagtagctttgacactgtcaatcgtttggttcaataaacgtaaaccatcattcaaggtttcacggaaacgatcttcttcagaacggatgactttttcgatgaattctttttgtgctaatacgtctgggtaatagcttttcatgatttcaccaacgattggtactaacttgtacatgaaagcgtcgttgatgccgagtttcttaccatttaagatggcccgacgaattaaacggcggagtacatagccgcgaccttcattggccggcattgcaccgtcaccaattgcaaacgtcacagcccgcgcatgatctgcgataatcttgaatgaaatatcatcagctgcattttgaccgtattgtttgtggtcactcatcttagctgtcgcttcgatcaatggcatgaataaatctgtttcaaagttggttggggcttcttgaatcactgaaacaagtcgttcgaggcccatccccgtatcaatgttcttgtggggttgttcaacatattcgccgtttggtaaatggttgaattctgagaacacgatgttccaaacttccagataacgttcgttttcgccaccaggatagttttcaggatcatcttcgctaacgttgttgaagctttgaccacgatcgtagaaaatttctgaatcagggccacaggggccttcaccgatatcccagaaattatcttcaacttcaatgatgtgtgattctggcaaaccgactttttcatgccaaatccggtgcgcatcttgatctttaggataaaccgtcacgtataatttttcaggatcgaaaccaatccacttgtcgctggttaagaattcccaagcccatggaatcgcatcttctttgaaatagtccccgacagaaaagttgccgagcatttcgaagaaagtatggtgacgagcagtcttcccaacattttcaatatcgttggtccgaatactcttttgtgcattggtaatccgtggattattaggtacaacgcgaccatcgaaatacttctttagggtcgcaacccctgagttaatccataataatgtcggatcatcatctgggacaagcgatgcacttggttcgacatcatgacccttttctttaaagaaatctaagaacatttggcgcacttgcgcactggttagttttttcatcatgtttgctccttcaaaaaaataaaacaccgctgcaatttcaaggacgcaaaagcgcggtaccaccttgattgcaacgatgttagtcgttaacctctttatgagtttattgaattgtttgtgatgttggggagcacgtcaaccaatggcggcaccttctctcagtctagaaaggcgttcctgtctccgtcagttcgttgcgtatatcccaacacttccaaagtataaaaaagatttgctgaattgtcaactaatccaaggtaacggtaatcgcaggccgatagtagcactgaagcgtcggattgcccaatgccgccgtttgaatcccagattcataggcgggtgcttcaggcaaccattgttccaaactataccgtccccctgtcacacaagcaccacccttataaacaagtggatcttgagtaagttcataaccgtcagcggctgttgcttgtaacccaaatggcatctgctggcgctgagtcggtcgtggtaagtgattaccacttaaccacaacgtcttactccctgcacctttaagccattcatactgatcaacactcaccagatcaaaaccgcgccgccgcaatgtctggcgtagttcactttcatcaccattagttttttcaaacacttggtaacaatctggtcgcccacccgcttgtaaaattaggtgcgcactttcaagtgtttcagctgaattttgttcccgccgcgcccgaaacaaggtattttggatttccgccaaaaactgacgcccaactagttggtttccattaaaacgtcctgttgtcgtttcatactcgccttggagtacccactcacttgaaattggtgtttgtgccactaacatcggtgccatattaacaatccgatattctgatgtcatctgatcaacgtattgatcgacatccgcttgcgtcgcccaaacgagtccttgatcaactggtaacgtatgtttagtttgtgcaaaccactcactcggtgctaagtgggctgcccctgcttgccatcccaactgcaccttagcttggccggggataaaaataaactgctgcccagctagccgggcactgtaagtttgaaatacttgagtgccaatcgttgcggtctcactctgaatcgcttcaattggaatcagcgggctaacaaagtagcgcaacacctggccaaaattagcgcgccgtgcttcttcggataacgataaccagttcagtaattgtaagtcattttcatgcatcacagccacctcgattatgaattaactagctattttgcttcttgttttgacgtttcttttcacgtaattcaagtcgttgttcaatccggcgtttcttttgtgcatcttgtttaatggctgctttaatctttttcttataaccgggtttgcgtttaagtttggcctttttgaccatccctttcatgccgacatctaattcatgcgtggtagctacccgttttttacgacggttccgatcatatgatgtgaccaattcgccatctttaaatgtctttggtgtgaacttgatgcccattgcttcaatttgtgcaacggcttgttcatcatctggaccataaagcgtaatcgcggttcctttaagaccattccgaccagtccgaccaacccggtgaatgaagaattctaaatcttcacgtgggacttcagcattaatgaccatgctaatcccttcgatatcaataccgcgggccgctaaatcagttgccacaacatattgatagtctaagttatgaatttctttcataatccgtttacgttggcgtggtggaatatcgccatgaattttagcgactttcaagccttgtgattgtaaataacggtggatgtcatcaaccttgctcttcgtattagcgaaaaccaagaccatgaaaggatggcccatcgtcaataatgaataaatggtttggttgagggctttccccttcgttggcactaaccagttgtcgattgttgggctaatcacagtttcgtttttaacttcttcaatcacaggattgtgcatgtatttttgtaagaagggttgtaacttatcaggaatggttgctgagaagaccatcatttgtaagtcttctggcaaacgactagcgatgtcatcaactggcttcaaaaagcccatgtcaagtgtcatatccgcttcatcgatgaccaagatcttcgctgtataaatcttaagcgccttgctcttgattaaatctaaaattcgaccaggagtcccaatcacaatctgtggttgatgttgttcgagtttttcgatttggcgttgcttgtcagtcccaccaacataacgaccaatccgaatatcccccgtcatgtgttgagtgattaattcggcagccgtatagatttggtaagccaattcgcgacttggggctgtgatgacgatttgaacttcgtctttttcaggcaccagtttatttaaaaggggtaataagaacgcgtgggttttcccactccccgtttgtgattgaccgataacacttttaccagcgttgatggctggaatcacacgccgttgaaccgccgtgggttttgtaaagtgcatgtcgtctaaagccgcaatgatttcgggttttagattaaattgtgtaaattgattatccataaagtcctgctttctattgtttgaatccggtaaatctggatctgcgtctattcagtgtactgcgcggctagcgctgataattctgcaataattatgtcgatttcagcttgatcagctgccttagcgccactagcgagtggatgaccaccgccatcatgttgcttcgctagttcattaatgattgggccctttgagcggaaatgcacgcggtaagtgtcatctgcttgttgcacgaagatgacccacgttaatacccctttcaaacgaccgggtgttccaacaatcgagtgtacttgttgcggttcaacatgtaaccggtcctgggttgcgcgatcaaccactaagtaggcgacttgttggtcgttcacttgaagttgatcgaataagtacccttgtaatttggcttgttccaacgtgatttcgttcatcttttgattgagcttatcatggtgaatatcaaacgtcatcatttgggcggcacattccatggtatgtggactggttgaattaaacatgaagcgtcccgtatcaccaacaatcccggcatataaaacacgcgcagctgcttgattgaattgtaagtggccttcgctgttattgacgatgtcaataatgatttctgaggtacttgaggcatcaggtaacgcccagtttaaatccccataaggatcatcgttgggatgatgatcaattttgattaattcagcgcctaagttaaacgtctcaccactaatccgaggtgagttggctgtatcagtcacaatcactaatgcaccttgataagcagccggttcaatttcttgaacgtttgcgagccatgccaagttaccggtgtcgctcccgacttggtaaatcgtcttgtctgggtagctgttacgcagtacttcagctaagccaacttgtgagccaatcgcatcaggatcaggattgacatgacgatggatgataatcgtatcgtaagtttcaattttagcaataatttgttctggagttgtcatttattaacctctttctaagagttgaccagtgacgagggccttagccacaatcacatgattggcgtaaacatcgacatcgattttagctgaacgccgtccaatttcgagcaagcgtggtaaaatctgaatctgcgtgtcgatttgaatcaaccgtaaataatggaggttgatctgttcaatcattgaatagcgctgatgttgcgtctggagcatttgttgacaagctgccgaaaccgcttcggtcagtacaccaaacgaaattgtccctaagttattcgtcatctggggcgtcacttcatattcatatgccgccgtataaaagtctgggacagtttcactaggacgcagtggttcgacaatctgatcataaaacgtctcggcgacttgcggttggcgttgcgccgtttgcatgttgctcatgacatcttgccgggtaattaacccttctagttctaaattgtccgccaccactggcatcacttctaaactattccaagtcattgaatggccgacactggcaacactcatgtattttttaacgctcgcgggttccttggtcatgactttatccaaggtcatcgtggccggtttatctaaaatatccttcaccgtcacaatcccaacgaggcgcatatgttcgttgacgactggaaaacgcgattgttttaccgccgcactcaattgcttgtagtcggccaccgtttgattagcatgtaacgtgtggatttcagcaagtgggtggtagatatcagccaccgttgtgatttcttttttaatcaattgatcggtcaacgcccgattaatcaatgccgccaccgaataggtatcgtaggcagtttgcaaaatcggtaaagccaagtcgttggccaatgcaatgacgtccgccgaagtgccaaaaccgccggtaatcaaaacagcggccccgttttcaagtgctaaacgttgcacatccgtccgatcaccaacaatcatcaatgactttggcgtaatgtagcgcgtgatggcatcgatttgcatcgcgccaatcacaaatttgtccaacaacttgtctaaaccagcgcggccaccaaggacctcgccgtcaatcacttgaacgatttcttcaaaggtcagattttcaatcttcccctttaacttctgttcaatgcggatggtaccgacccgttcaattgtgctgaccaggccgttattttctgccgctttaattgcgcgataagccgttccttcacttaccgagagtgttttggcaattgagcgcaccgaaatcttgtcaccaatcggtaaattttcgatgtacattaaaatttgatcatgcttagttgccactcaacgccaccaccctttatcagatttacatagttattaatagtatatcggttttagcgcacaaaaacaaaggaaactcaactattcacgctcccaatcgtataacggtaacgtgatgttttcaaatgtttgcggtgccaagttagtcaccgtaatcccgagcaagcgcacgccatcttctgcatggccgatggtttgccaaatttcccaagcgatcgcctcgagttcagctgccttgccgacatattcgttaaatgttttacgcttagtaatagtttcaaattggcgattccgcacttttaaaacaactgtcaaaccgtgtttttgattcttgcgtaaacgccgttcaagttcaatcgctaacttcttcaactcaacttgcacctgctcttcactgattaggggttgcccgtaagtattctcattgccaattgatttgcgttcacgttggtaggcgaccgggcgattatcgatgccgcgcacgtgccgatataagccgtagccaagcttgccgaaattttgcatcagcatcatttctgattgttcaagcaagtccgcccccgttaaaatcccgagttcttgcattcgcggcgccgttttcttaccgaccccacggaatttttcaattggcaagcgacttaaaaaggcaatcgcttgttccggcaaaacgagtgtccgccccgctggcttgcggtaatccgatgccatctttgctaagaatttattgtacgaaatccccgccgagctgacgagttgggtttctttaaggatttctttttgaatgtaggcgaccacatcaattgtgtgtgccaagccgagtttattttccgtgacatcaaggtacgcttcatcaaaagcaatcggttcaatcttatcggttaccgtatgaaaaatcgtgtgaatctgttccgagaccgattgataaagcggaaaattgggcgccttaaaaacggcttggtgattcggaatcagttcagctgctttttgcgcactcatcgccgagtgcacaccgtattgtcgggcaacatagttcgcggtcgtcacgacccctttgccaccagtatcactcggattacgggcaatcacgaggggcttttggcgtaagtcgggctgttcacgctcttcaatcgatgcgtaaaacgcgtccatatcaatgtgaataattttgcgactcgtatcattttctaatggaatcttgaacagctctgccatgttacccctccttaattttttcaacatgctttttcaggcacattgttccgcttttgacgcacttcttcctttaacgtgcttttaattcgtaaccttctgtgctttgctacatcagccaaataatcgcccttggcgcttatccgtctgactaggcaaatgctcaaaggctaaccgcgaattaacgcacttcttcctttaacgtgcttttatcaacaacttcttccgctttacctcacttgccaaatcggcgattccgtcgccaattcgtcaagtgctgtaaatgctcagaagttacccgttgatgacgtacttctttcaataagaaaagcctggcatgagcatctcatacacagactttgctgacttgtttaatttaattattttgagtgggatcaaaaatccattcggcccctgttgttgccagtaaatctgttgcttctttaggccccattgaaccgattgagtaacctggtagtggcgtttgatccgcatcccagacttcacgaatcgcatcgacaaattgccatgaagcggctaattcatgccaatgtgtgaagttcgtgccatccccattgagcgcttctaaaatcaaacgttcataagcttctggactgtcagccaacatctgttcatcatattggtaagccaattgatcaggtttcaaggcgaatccttgaccgacttctttaccattaatcgttaatgaaaagccttgttccggttcgacatagattgttaagacatcaggtgccattgctgaacaatctgacttatcatcagcaaaaatattgacgccagtcttcttgaagacgatattgatttgcgtttctttacgtgccaatcgtttaccggtccggacgtaaaatggtacgccacaccaccgttcgttatcaatcatcactttcccagcgacaaatgtttcggtttgtgaatcaggcgcaacgttggtttcttgttgataccccggcttgttttcgccatccaccgatgtttcagcatattgggcgcgcacaaagttttgtttgatttctgctggtgagtaaggttgaatacttctgaaaagacgtgttttttcacgttgcacatcttctgccgtaaagttaaccggcacttccattgcaagcattccgatcacttgcatgatatggttttggaacatatcgcgcaaggcccccgatgtttcgtaatagccagcgcgttcttcaacccctactgattcagccaacgtaatttggacgttatcaatgaattgattattccatacaccactcaatagaccgttcccaaaacgcaaagcaacgatattttgaatcatctctttaccaaggtagtgatcaatccggtagatttggtcttcatcaaaggtttgcgtcaattcttggttaagcgccttagcactttcataatcgcgaccaaatggtttttcgataatcaaccggttaaagccatccgccgttaggagcgcttctgatccgagatgacttgcgattgtcccgaagaaccgtggtgacatggccatgtaataaatccgattttggtgtaattcgtattgttcatccaactgacttgctaaagcctttaatgtttcgtagtgcttggcgtccgtcacatcatgtgattgataatagaaatgacctacgaaagcttctttagttgcttgatcttcatcaaagttgtccaaagctgtcatgacgatttcgtgataatgatcatccgtccatggccgccgtgctgttccaatgacagcgaagtgttcttttaaataacccttccggtataaattaaataatgcggggtataatttccgttgggctaagtccccggaaccaccaaaaataataaagagtgctgctaaatctgtgtgcatatctcacaccactttcatataaattaattttgtggcgtcacaaagatgtgttgtgccgctttgaggccgatttggatttctgtttgactcgtattattaaaaacagtcaacggactttcgaagaggccaaccttttggagcgtcacactgtcaccgactgacaagccgatttccagtgtatattttaataagtcattatcatccaatacgcgatcgataatcgccgtttcacccacttgtaatgtttcaagtgcgatgtgactttgttgttcgaattcccccttggcattgggtataatcccaccatgcgggcaacgcgttggatgccccaagaaatcagctaaccgttcagccaagtcgtgattagtaacatgttcgagttgttctgcttctgggtgcaccgtattgaattgataatgtaacttgtcgactaaaaaaacttcccataaccgatgattgcgcactaatagggctgcttcgcgggcgccttcacttgttagttgaatcccttggtaaggtgtgtggttgacgtagttttccttcactaacttattgaccatttccgtgactgatgccgccgaaacgttcaatcccgctagtatttccttattggtaactttctttgcgtcgccaccaagttcaaaaataatttttaaatagtcttctttattgggtgtcattgccatccagatccttaatcaagtttgtcgacaaacttttcttagttatccctgaactaaatgaatgtctactttctattatgccttatttgtaataattttcataccatcaagcttcaatttagtcccttaaatagtaaaaaattaatctcttttcagcaacaaaaaaaggcggtagaccgatttgtttcagtctaccgccttaaatttgtggtcgggcttctcaaaccacttattctagcaaatcacttggtcaatttgctagaattctgcttcgagaatccctttcaattctttaattaatggttcttttggattggttaccgtacagttatcttcatatgccagttctgctaaatcatcaacgtggcgatcaaagtcggcctttgtcacgccattatcacgtaaacgcatcttgatgccgatactttccgccaatgcagtcacagcatctgcgtaagcggccaccagttcttcagtcgttttacctggtaaaccgagataacgtgcaatttcagcataatcttcatctgctctgaagtaactgtatttagcccagagtgctcgtttcgttggtgtcttagcattatagcgaatgacatgcggcattgtaatggcaatcatcaatccgtgcggcaaattgaacgcgccgcccagtttgtgcgccagtgaatggttgatacctaatagcgcattggcaaacgccattcccgccattgttgacgcatcatgcatattggctttagctgtcttatcgcccgcataactcgcttgtaagttatcaaacactaatttaatggcttgcaaactgagcccttttgtataatttgacgccatcgctgatacgtaactttcagtcgcgtggcataaaacgtccatcccagtatgcgcaaccacgcggggtggcacactttcgatgaattgactatccacaattgccacatctggtgttaacgcataatctgccaatggatatttgatgtgcgtttcactatcagtaatgaccgcaaacggcgttacttcagaacccgttccagaagtggttgggatacagattagtttcgtccgatcgaggtttgggaacttgtaagtccgtttccgaatatctaagaatttttgcttagcgccaaagaagtcggcatcttctgaatcatagaataaccacatccctttggccgcatccatgactgagcccccaccaatagcaacaattgtatcgggtttgaagcgtttcatcacttcggcgcctttataaatggtatcggttgatggatctggctcgacatcggcaaatacttggacctgcacttgatctgtgcggcgcgccaagacgtcttcaacaatttgcacgtaacctaagtcgaccatcccttgatcagcgacgataaaaaccttatgcaagtccgccattttttctaaatagttgactgaatttttttcaaaatagattttgctgggcaacttcacccattgcatgttattccggcgcttggttagcgtcttcacgttcaacaaatcgatcgttgaaacgttgtgggagattgagttatggccgtatgacccacagcctaaggttaatgatggtaacatgtcattgtataaatcaccaatcccaccttgtgctgatggtgtattcactaagacccggcatgctttcatccgttttgcaaattcgagtggtaaagcttcatccgttgtatgcaacgaagccgtatgcccaagaccaccaagatctagcattgcttcacagagttgcaagccatcttcgcgatctttagctttaatcatcgcaagtacgggtgataatttttcatgtgagagtggatattggtgtccaacacctttaatttcagcaattaaaactggcgtatcttctggaatatcgatcccagctagtttggcaattttagcagcagattggcctggaattgaaggtcggaccgcattcttatctgggtcgattactgcgtcattgagtgctgataattcgcttggtttagcgaagtaaaccccttgtgcttggaattccttcttcactgccgtataaatttcagcatcaacaattacggcttgttcagaagcacaaatcatcccgttatcaaatgatttcgagaggattaaatcattgacggcttgtttgatgttcgccgaagcttcgatatacgctggcgcattcccagccccaacccccagtgcgggtttaccagttgaataagcggctttcaccatcccaggaccaccagttgccaaaacagttgcgaccccttcatggttcattaaagcctgggtagctgcaatacttggttcttcgatatataagagtgcatctgctggcataccggctttaaccgctgcagctttaatgacattcaatgcttcagccgaacaacgttgcgcactaggatggaaagcaaagatgattggattccgcgttttaatcgcgatctcagctttaaaaatcgtcgtcgaggttggattcgtgactggtgttacaccagcaatgacaccaacgggttctgcaatcttagtgatgccatgttctggatcttcttcgatcacaccaactgttttattgtctttaatcgcattccaaatttcctcggttgcaaaaatattcttgatggctttatcttcataaatcccacggccagtttcttcaaccgccatcttagcgagtgccatatgttggtctaacccagcaatcgccatttgatggacaatattatcaatcttggcttgatcgaatgtttccaaaattgctaatgcccgttgtgcacgcgtcactaaatcggtgaccatttcattcactgtgttttcaaccgtttcaactgctgctttcttaaccatatcgattccctccatgccaattaactattgtgatttatttaacaaagttagtttagcgcattttgagttgtttgtaaactgttttgtgattataattacaaattttatttcttagttaaaggcgatttatcttttaaaagcctacttttgataataaattcactatataatgcaaataaaaaagcgctcggttgaagtattcaatcgagcgctctctgaattattttgtatcttcttttgtttcttcaaccgtttcttcttcaaccactgttgcggcttctgaagcagttggtgttactgtccggattgcactcaagttaaacttgaggtaaacgccgtcacaatctaagacaacgattttagtatctgtattaacagaatcaatcacaccgtgtagaccaccgattgtgatgactgcgtcgccttttttcatttggttcaccatttcttggtgtttttgttgttgtttcttttgtgggcgcattaccatgaaatacatcattgccatcattaaaattaagataacgaagaaactgggattaaaaccgccggcacctaacacaaagtttgccatttaaaaaacctcttttcaattttgtctattactaactctatcagacttatcaagcaacttccagtgattcactagaaattccgagtgttcttttcattgtaaccatattcttcgaagaacgcttctctgaattccaataaattatcttgttcgatggcatcttgcacttgatgcatcaaattaatcaagaagtataagttatggtaactcgtcaaatgaatcccaaacgtttcgtccgctttaatcaagtgccgaatgtaagcgcgggtgtagttcttgcagacataacaatcacacttaggatccaatgggcggaagtcttctgagtacttcgcattcttaaccactaatcggccttgtgaggtcatcgttgtcccattacgggcaatccgggttggcaacacgcaatcgaacatatcgacaccgcgaatcacaccatcgattaaggcatcaggcgaaccgacgcccatcaagtaccgtggtttgtcttcaggtaacattggtgttgtgaaatcaagcacgcgattcatttcgccttttgattcaccaactgataagccaccgattgaataaccggggaagtccatcccaactaaatcgcgcgcactttggcggcgtaagtcttcaaagccggccccttggacaatcccaaatagaccttgcgttgctgggttttgatgcgcaatcaagccccgttcagcccaacgtgatgtccgttcaactgattttttaacgtagtcataactttcaaagaatggtggacattcatcgaaactcatcatgatatcggcacccaaagcattttcgacttggattgctttttccggtgataagaacagtttttcgccgctcaaatgactcttgaaagcaaccccttcttcactgatatcccgtaatttcgcaagtgagaacacttggaaaccaccagaatcggttaacacaccgcggtcccagttcatgaacttatgaagaccaccggctttttcaacgatgtcttccccaggtcgtaaccagagatgataggtgttcgataaaataatgccggcacccatttcttttaattcttcaggcgccattgtcttaacactggcttgggtcccaacaggcataaacatgggtgttttaaacgtgccatgtggtgtcacaatttcaccaaggcgcgccccggtatgtttttctttcttgattagacgatacttgatcgctggttccatttaatcgactccaattctaggattattgttggttcagtaataattggtacgcatagcgtttcggtgacggatcgtttgcaatgaagatgtcaccacgatattgaaagcctactttttgaatcatatgttgcatcgccaagttatcagggtgcgtatcgatgcgtaaatcatgtgcgcctcgtaaactggcagcggtcaccaataaggttaaaaactgtgtcccgagatgttggccgtggaaagcactatcaagtgcgacgcggtgaattgaaaaataaggtgtcgaaccagattgccattgaccattggtaattgctgcatagccaggatcttcagttgctagaattgaggcgaccccaatcacctgttgatcagccatcagaatgtaacataattcttggcgaatctcgtcttcaaactgagtttgattaggttcacctgcttgccattgatttatctggcgattctttaaggcggcctttgcatgttcgataatctctaaaatccgcggtaaatctgtaaacgttgcttttctcaaatacatcaatgctgccacctcatttttgtcgaattatttaacaaacatggcatcgccgaagctaaagaaacgataccgttcatcaacagcgtgttgataagcatttaagatgttttcgcgaccggtaaatgaagcgaccaacatcactaaggttgattttggtaaatggaagttcgtgatgaatgcatcaacagctttccattgataaccaggtttgataaagattgatgtccagccactatcagctttgagttcaccatcaaacttcgtcgcaattgtttctagcgtccgaatgctggttgtccccgttgccacaatgcggccaccattttgtttgacttcattcaacgttgcagcagcttcttctgttaatcggtagaattcgctgtgcattttgtgatcttccacgttgtcttctgaaacaggccggaaagttcccaacccaacatgcaacgttaagtacacgagtttgatgcctttatcctgcactttttgcaagagttcttctgtccagtggaagccagcagttggtgcggcagctgaaccaggttctttagcataaaccgtttgatacatttctggatcatctaatttttctttgatgtatggtggtaatggcatttcacctaaagcttctagaatttgcatgaagatgccgtcatacttgaattcaatcatgcggccaccatgttcgagttccttggtcacaactgcttttaattgaccatcgccaaaaacgacttcggtaccaactttggcccggcgtgctggcttcatcaagacttcccattcatcgtcatgcgtgttgtttaaaagcaagacttcttcgtggccgcccgtatcaggtttcacaccatataaacgtgctggcaagacccgtgtattattcatgacaactgcatcgccgggatttaattcatcgataatgtcgtagaaaactttatcttctagtgcgcctgttttgtgatccatcaccaataaacgagacgctgcccgttcaatcatcggtgtttgagcaattaattcttctggtaaattataatcaaaatcttctgttgaaaccattgtgtaacctctttctaattttctgaatagggaataccgagatgttcataaccagcgggcgtcacaacacgtccccgcggtgtccgttttaagaacccaatctgtaataaatacggttcgtaaacggcttcgattgtttcattttcttcaccaatattagccgcaatcgtctttagaccgactggaccgccatgataatagtcaatcatcatctggagaatcttgcggtcaatactatctaagccacgtacatcgacttgtagttgactaagcgcatggtcggcaatcgcttgatcaattgccgcttggtccgccacttgagcgtaatcgcgaatccgttttaataagcggttcgcaatccgcggcgtcccccgcgaacgacgggcaatctcatgcgcgccttcttggacaatggccatgttaaagacatctgccgagcgttcaacgatatcgaccaaatcatcttcatcatagtatgccatatgttcgacgattccgaaacgatcacgtaacggtgccgacaataaaccggcccgagtcgttgcgccaatcaaggtaaacggtggcaatgggaaatgcaccgggtgcgcagttggcccttgtccgaccacgatatcgatgtaaaaatcttccatcgccgaataaagtagttcttcgaccactctcggcaagcgatgaatttcatcgataaatagcacatcaccaggttgtaactcgttcaacaacgcgactaaatcgccaggccgttcaattgctggcccactcgtcgtccgaatctgaacatgcagttcattggcaatcaccatcgccaaggtcgtcttacctaaaccaggcgggccatataatagcacatggtccaacgactcttcccgctttttagcggcttcaatataaaccgccaactcatttttgacccggtcttgaccgatatattgcgcgaggacttgtggccgtaacgtcttttcaatacttgtttctgcgaaatcttcgttttctgcggaaacaattcgttcttctgccatccattagtcctcctttatttcttcattaataagcgtaaaccttcacgtaagtactgatccgtagtttgtgcattgaaatcagccagtgttttggtaatcgctttgacttcgcgggctgaatacccaagcgcggttaatgccgctaacgcatcgtttaattctggtgattcaccaggcgtaccaagttcgatagccgtttgaccagcgatcgtttcggtttgttccaaatcgccgagcttgccctttaaatctaagacaatttgttgggcagtctttttgccaaccccagggaacttggtcaaatagctcacatcatcattcataatcgcttggattaacccagaatgatcgctattggctaagatggccaaggcactcttaggaccaattccagaaacactgattaatttttggaaaatttgcttttcatctagatcgtaaaaaccaaataacgtgatatccgtatcacgaaccgcttgatagacataaatctgaacgatatcggtcgttgattcggtgtaacgatacggattagcaacttgcaattgatagccgacgccttgaacttctaagacgacatagtacggactaaccgccgtcaccaaaccttttaaatattcatacataaatttacctactttacgagaacgtatatttgcttgttaaattgtaacataaaatccgaatcgtgaaacagccagcagccaaaaagcgtaaaagaagggcctaagtgacccccggccaactcaaaccctagcaattagtattcacgaatcttcggcggttggtaatccttgataaaggatgccatcacactcaacgaatcggtaaataagtatttttcaaaatcgacctgtgttaaaaaaccttcactgaccatgtgggctaaaaattgttgtaacaaatcataatagcctgcgacattataaaaaatgcagggaccattttgttgcccaattcgcgcccatgaaataacttcactcatttcttccagcgtaccgggaccacccggcaatgcgataaacacatctgccagttcaatcatcttggctttacgcgctgacatcgtatcaaccttaatcatttcggttaaacctggatggacgagttcttgctgactcataaaccctggcatgacgccggtcacttgtccatcatgggctaacaccgtgtcggccacggtgcccattaaaccaacttgggcgccgccataaatcaagcgcgcattgcgcccagcaatccaagtgcctaacgccttagccgcttccgtgtagattattttattaccactactagcgccgcaataaacggcaatgttttgcgttgccattagtcagcctccttagcggttaacaaccgagccaccgtactgatgggcaagccaacaacattgtaaaagtcaccgttgattttctcaacgagcagacttccctgtccctgaataccataagcaccagccttatcccggtactcttcggtgtctaaatacgtttcaatcatttcatgacttaacggccagaacgtgacatcagtttggacaaccgttttgcggatttcaccatcaatggataaccaaacacctgtataagcttgatgcgtgctgccactcaattgccgtaacatttcggctgcatcttgacgatcatgtggcttaccgtaaatcgtaccctgaaaactgacaacagtatcagcactgagcacagtggcctgaggattcttttgggcgatggattcacccttaagttgcgccaacatctgcacgtagtcagctggtgccgtcactggtacctggcgttcatcgattgttgcgggttggacctcgaaatcaggcacgactttttgtaaaagttcgcggcgtcttggtgattgtgatgctaagataaacattattcgccctcccaactatggtgtggatcttgaatccgtttaaacattttttctaaatctttttgcgtgtaatgaattaaaaccggtcggccatgtggacagttaaacggattttccgtctgtgccagatcaaccaacaatgctttagcttgcacatcatctaagtgatggtgtgccttgattgactgtttacagctgatcataatcgccgttttttcacggaaatgggcaatgtctaacttcccgttttccaatacagtgtcaatcatctcgcgaatcgttgcttcttcttggccttgcgcaatccacgtcggatgactatggataacaaaactattttggccgaagctctctagctgcacacccactgcggcaaggagttccttttgtgcttgaatcttaatcgcatcactattgggatattccaacacaaggggcaccaataaattctgggcgtcgttgctaacttcaccaattttttcgcgatagtattcatacttaatccgttcttgagcagcatgttgatctaaaatgtaaaaaccatcttcaccttctgctaataagaatgtattgtgcagttgtccaatatagcgtaacgctgggaaacgctcaatgggtgctgcatcatcttcaggttgttcaccaaacggatttccgaccgcctctgcttcgtacttatcatcccaccgggccaattgttggggttgttcaaatatcggcaggctatttaaattaggattagcagttggttctcgtttaaggggtgtttcggtttccgcaatttgcgctgccgcttgcatttcagttttaaccggcttttcaggaactgtttggggctgaattggccgcaccgtaccagtcgcattgcgccgttgactcgtaatttggtttaaatccatttgaagctggtccacatcgaccggtttcgtttgttttagattctgcactgcatcgggaattaaattctcggtgctgagtcgctcacgaattgctttttcaatcaacgccatcaaagcaggttccttactcaagcggacttcttgcttggtcggatggacattgacatcgattaacagtggatccatttgaatatttaaaacgacgactggataacggccgaccattaattttgaaccgtaacccttgataatcgccttattcaattgataattcttgatataacgaccattaatcaacactgaaatgtaattacgactggcccgcgttagtttcggtagcgatacatagccggttaatttaaaatcgagatcttctgcactgactggcaagagttgcttagccattgtaacgccatagatcccggcaatcgtctgttgtaaatcgttattacccgccgtttttaacagcaggtgatcatcattggttaacgtgaaggcaatctgaggatgactcatcgccaagcgattgacgatatcgatcacgtttgccaattcagtctggaacgtcttcacatatttcaagcgggctggcgtgttgaagaataaatcacgaaccgtgattgccgtcccagggcgaattggattagttttctgttcttctaagacgccacctttaaaatgagcaaatgtccctaacgaatcagcggttgccgtttcaatcgtcaaatcggacactgacgcgatactggctaacgcttcaccccgaaagccaagtgactgaattttgaaaagatcctggcgcgtggcaatcttacttgtcgcgtgtcgcttaaatgcagtgggtacatcttccggttcaatcccatcgccgttatcgatgacttgaatcaattgcaaaccagcctgttcaatcacgatgtcaatttgagtactattggcgtcaatcgcattttctgccaactctttgacaactgaagctggccgctcaattacttcgcccgccgcaatttggttacttaatatttctgacagttcatgaattttccccattagcgttctcctttttctgacgtgtgggtatttagtgctaaaacgtgcttttcaagctaactttctgcgcttagcgctgtgaatcaaatcatcgactgcgtcgctaattcgcttccctgtgctaatgctcaaaagtttgataagcttgaatacactcttatccgaaatgtgctttcatcaacaacttcttccgctttaccccacttgccaaatcggcgattacatcgccaattcgtcaagtgctgtaaatgctcagaagttacccgttgatgacgcactcttatttgtttaattccttttgccatttgtatagcatgtttagcgcgtctagtggtgtggcgctcattaagtcgaattgtttaaccgccgctaggactttagctgcttttggatccgcttgtggtgccacttctggttcgaatagtgaaatttgttcatccacttcttcaaccggttcagcagccggcgcgacagctgcctttggtttatcttctaattgatccaagatgacatctgcgcggttcaacaacggtgtcggcatccccgctaatttagccacgtgaatcccgtatgacttatcagctgggccagccagcatcttgtgtaaaaaaactaactcgccattttcttcaactgccccgacgtggacgtttttcaatgcggttagtgaatccgctaagctggtcaattcgtgataatgcgttgaaaagagtgtcttggcatgcacgttgtcgtgaatgtattcaataatcgcttgggccaaggccattccatcataggtggctgttccgcgtccgatttcgtcaaagagaatcaagctattttgtgtcgcgttcataatcgcgcgattggcttccatcatttcgaccatgaaggtactttgaccggaaattaaatcatcggccgcaccaatgcgcgtaaagatctgatcaaaaatcggtaagttcgcagatttagccggtacaaaacatcccatctgcgccatgatgaccgtcaaagccagttgccgcatgtacgtactcttcccagacatattcggaccagtaattaagagcatatccgtatcggtgcccatttgaaccgcgttgggaatgtatttttggcgaccgagcactttttcaaccactggatgacgcccatccactaaatcaatttcgcgactatcagtcattaatgtcggctgaacgtagtggtagttttcactgactacggcaaaactttgtaagacatcaagggccgccacacttttagcgagggtttgaagccgttcaatctccaacttaacggtttcgcgaacttgcgtgaataactcatattcaagcgcggttgagcgttcttcggcttctaaaatcaattgttctttcgcctttaattccggtgtaatgaaccgttcggcgttggttaaggtttgtttccgttcataacgcccttcaggtagcgcgtctaaattcgcacgtgtcacttcgatatagtaaccaaacacgcgattaaagccaatttttaaattatgaatcccggtaatttcgcgttctttagcttcaagttgtgctagccattgtttcccgttagacatcgcatcgcgataatcatctaatgtttcgttgtaacccgattgaataatcccaccgtcagtcactgaaattggcgcatcgggattgatagccgtttcaatgagctcgcgtacatcatcaaccggatcgagttggtctaacgcacggtcaaaggtctgatcgtcattaatgcccgttaaaatcgttttaatcgttggaatttgttccaaggaagtcttcaactgaattaaatcgcggccattaacactgccaaatgcgacccgacctgctagccgttctaggtcatacacttttgtgagggcgtcttgcaagtttgtccgttcaaaataatggttcatgaaactagcaacttggcgttgccggttttgaatcgcctttaaatccaataatggccgttctaaccattgttttaataaccggccacccattgccgtcttggtttcatccaataaccacaataatgtcccgctcttatgaccagtgcgtaaagaagccgttaattcaaggttcatcttcgcagaatggtctaattttaaatattgggatggctcgtactcttgggcccgttgtaaatgccctaaatggcgcttttgcgtcgttgccaaatacaagaccaattgtttaatcacggccagttcaaggggctgggagatgttttgtgaaacgaaactgacttcggccgttgcatcgccatcttcttgatacgacacgagaatttgctgttgaacaaacgcgtgcacaacctcactggcaacaccgtggttaatgacaacttctttggtttgtaaactcaacatttcgttgagcaataaatccaaactcgcaatctggctgactttcatctcaccagttgataaatcggtataagcaaagccaaactgatcgccatctgccaccactgctgttaagtaattattttgtttggcatggccggctttttcatccatcatcgttcctggtgtgaccagttgaatgacttcccgcttgaccatccctttagcggttttaggatcttccatttgttcacaaatagcaaccttgtaaccttgatcgactagaatatcgatgtaattttgggctgcgtggtgtggtaccccacacattggaattggatcatccgcatttttattgcgtgctgttagtgtgagttccaataattgtgaagctttgacagcatcatcattaaagagttcgtaaaaatcaccgaggcgataaaataaaaaagcgtccggatactgatccttgaccttttgatattgcgccatcattggcgtttctttcgttttttgtggcatgttgttaatccctctctcattgacgttgatctgctgctaaggtgcttaaaattgcgtataggggtgatctggtgaaatctggattggtttaattgatttagcgtgacccgttttgtcatcaatttcaattaaacagccattcaattgacccggtccttcggtcactaattcgaaccgttctggccgttgtgttttaaaccgattaatgatcttttcgcgcttcacgcctagaatcccgttataagggccagtcatcccagcatccgttaaaacggctgtgccttcaggtaagacgcgcgcatcgtttgtttgcacatgtgtatgggtcccaactaacgctgaaatccggccatcaagataccaagcaagtgcgagtttttcactcgtcgtttcggcatgaaaatcaacgaagatacagttggtttctttactaatttcagccaccatttcatctaacatttcaaacggatcaattagtagttcattcatcaaggcgcgcccttgtaagttaatcacggctaatttggcttgattgacgttaatcattgtcatcccttgcccaggcgttcctttcggaaaattggccggccgcactaattttttagcatcgtcgatgaattctaaaatatcgcgcttattccaagtatgattgcccatcgtaatcgcatcggccccagcttgtaaaagattcttataatccttttgagtcatccccttaccatccgcgatgttttcgccgttgataatggtcacctgtggtttgtattgttgctttaatgctggtaggtaatcattgatcattttttgacccattgtgcccactgtatcaccaataaataaaattcgcatgttgcgccccttaatgttctttctcagactttgatatagcttctattgtagcaatttttgcccagaataaaaagttttgctgtacccgtagaaaaacaaaaaaagccccgcgcaccgaaaaggtgagcggggctgataatgtgcttttcaaaccatgttcctgcgtttagcctaattagccaaccaatcgacttcgtcgcttattcgtctaattttgctaatcctcagaacataatcggtttgaacacacttcttcttttaacgtgctttttgaaactgactcttgcgcttagctacaatccgcaaacgatcaactccgtcgctcattcacagatttaggctaatgctcaaagtcaaaccgtttcaaacacacttctcttttaacgtgcttttagttgcaccaacttccgcttaatctaaaattggcagtcatcccacaactcgggataactgccaattttgtattaatgctcggttgctaaacgcacttctttctttaacgcgctcctcgatcagtcttttccggttaactgcaaaatgagcatcatggcaagaaccgccacaatgcccattttactgttaatcttcaaagcctactcagatcgagtcgcacttctagtgttttaagtgataactatatgttgaaataataatgttttcgcggtttgcaaatgccgttcttagtcttagacttgattggttatgcaaaatgttttgccatggttttcttggtacgaattgtgggaccaagaccgtggttgtaaagttccgtttttgcgcattcttgctaacaatgtcaacaaagcgaacaattggtttttgaattgaccggtatgatgaatggacatcgacgaaccggacattcggaaaatcttccttaaattcagcttgaatttcacgttccttggctggattttcatccgttgagacatgcatcgcaatcacataatccccgattgattgtgcgtaatctagcgcaccacgggttacttgggtcacgttgctgaccaagacaatcacagttgaaccgtcataatcatgcaagacggcttctttagcactcacgcgtagttgaagcgccactttcttgtaatgatcatgaatcttatagaaaatccaaatcataacaggcatgatgatgaagaatggccagatatcaggtaagcgataaacgaagagaatgactaagatagcaaacgaaatcaaagcgccaacaaaattggcaattgatttaccaaaccaattctttggtcgttcgacccaccacttgcgcaacatcccagattgagaaagcgtaaatggaatgaacacaccaaccgcataaagtggaatcaagcgtgatgtatccccgttaaagatgaaaatcaatgccattgaaccaatcgccaatgtaataatcccgtttgaataacctaaacgatcgccacgatccatgtacatgtgtggcatatatttgtctttggctaaattatacgctaacactgggaaagcggagaatccagtattcgcagcgacggctaaaataaaggccgttgcaaattgcacaatatagaataaaaagcctttcccaaaggtgtgttgggccacttgtgatagaacagttactttttctgctggtacaatgccgtaccagtagtttaaaaatgtaatcccagcaaagaagaaacctaagatggctgccatgattgctaatgtttcagccgcgtttgttgcacgtggcttcttgaaaaatggtaccgcattactgatggcttcaaccccagttaatgatgatgaacctgatgagaaggctctaaaaatcaacgccatcgaaacacctggtacaacagccccaacggttgatgttgcgtggaacggaatcgcacctgtgaagatcttataacacccaacgatgatcattaaagtcatcatcaagacgaataagtaaacgggcaccattaaaaatgatgctgattcacgcatcccacgtagattcattcccatcaagatcaaaacgataatgaaggaaatccctacttgatgcccatacaatgccggaatggccgaggtgatcgcttccgcacccgcggaaatactaaccgcaacggttaacatgtaatccacaagcagtgaaccacctgccactaaaccagcatttttccccaaattttcactggaaacaacgtaggcaccaccaccacctggataggcgtggatcacttggcgatatgacaaagttaatgacaatagcaatacgagcacaaaggctgcgattggaattgaataccaaattgccgcggccgaaagggtcgtcaatacgatgacgatttcttctgtcccgtaggccactgatgacaatgcatcagaagatagcatcgctaacgctttaaagcgtcctaatttttgattaccctcatcggaagattttaacggtttcccgataaaaatccgttttaactgttgcatagcaatatgacccctttaaataatatttctaacataaaaagccctcatgtgaatatcattcgtcgcaatccacacagtgacttttgaatttctctataacttaaaaaaataattgccgtttattcaaacaaatcgtattctactatagttacgcatgaattactaccacaatttaaaaaagaactgaccaaggtaatcgaaacgcctcgattccttggtcagttcttattttttatgataaacgacgggcaaaatccggtttgtaatctgaaattttagtaattcgaactttatcgccaggttgtggtgcttggataaagtagccatccccaatgtagattgcgacatggtgggctgttccaacccctccccagaataataggtcgtttggttgtaattcattgagcggtacatctttgcctaacttactttgatcttgtgaaacacggggtaatttaatcccatttttagcgtaaacgtattgcactaagccagaacagtcaaatccttcgggtgtggtgccaccccaaacatagggtcgcctaaatatttaaccgcttcttggataatcttattattcattaaatccttgttaccagtaattaatgcggcacctgcatcactcgccgctttttgagcagccgcttgcgcctctaattctttcttgaacttcgtttgtagttgcgttaattggtcgttagcttgttgtttttgttgatctaagtccttaattgcagcatcattttcctgtgataatgataccagcttggcctgttgcgcttctaattcagtcttttgttcagctttttttcagctaatgaggccgtttcagcggcattatccgccttagcgtctaacagtcgattgatgattgaacctttttggaataaatcgctcaaactttggctcgacaataaactatcgatcatatcaagattaaaactgctatctcgtgtttgtaattgccgcaggttaccttcaataatcgccacttgcttttgataatcagcagatgttttgctgaactcgtcttgtttttctttaatatccgcctgttttgcagtcatttgttcgttcaattgcgttgtttttaacgttaaattactaatattattattcaattcggatagatgatcttgtgctgtcttaatggcagtttgcgtttcttcaggcgttgcttggaccgtttgtggtcgcgctaaaaagaagccacctaacattaaacaggttatcagtatccgccggtttcgaaaaatcattgtcaacacctccaactattattataccgcaatcaaaattaattaatagggttgcgcacaatttatatatgcgcattttttttgaaaaataaaaaagttccaaaacttttgccagttttggaactttggatttaatcgtgctttttggttataacgccttccgcttaactacaaaacgagcgttatggcaaaaaccgccataacgctcgtttttaggttaatgctcagaaccaacccgtttcaaacgcacttctttacatcataccgcccattgctgatgggtccatgcctgctgctggtgctgggttgtcttctggtttgtcagcaaccactgcttcagttgttaacattaaggccgccacactagctgcattttgtaatgctgaacgtgtcaccttagttggatctaagatgccggcttcaatcatattttcccagttgccgttggctgcattgtagccgacttcaactggttgtgatttaactttttcaacaattactgagccttcaagaccagcgttggttgcgatttgacgaacaggttcttccaatgcacgaagcacaatgttaatcccggtttgaacgtcgccttcttctttaagcgcagcaacactttcgatcacatcgattaatgctgtcccaccgccggcaacgtagccttcttcaacagctgcacgcgttgcgttcaaagcatcttcaatccgatatttttgttctttcaattctgtttctgtggcagcaccgactttaatcactgcaacgccaccagctaatttagccaagcgttcttgtaatttttcacggtcaaagtctgatgttgtttcagcaatttgtttcttgatgttttcaacccgttcagcgatggcatctttgctaccagcaccttcaacgattgttgtatcatcttttgtaacagttaccttaccagctgtccctaattgatcgatagttgtttctttcaattctagaccgaggtcacttgtaatcactgtggcacctgttaatgtggcgatatcttctaattgttccttacgacgatcaccaaaaccaggggcttttacagcaaccacgttgaatgtcccacgaatcttgttcaagacaagtgttggtaatgcttcgccatcaacatcatcagcgatgattaacaaggctttaccttcttgcacgattgattgtaaaagtggtaaaacatcttgaatatttgaaatctttttatctgtaattaagatatatgggttatctaggtcagcttccatcttatcgttatccgttaccatgtattgtgacaagtaaccacgatcgaattgcatcccttcaacaacgcttaattcagtatcaatcccttttgattcttcaactgtgatgaccccatcgttgccaactttttccattgcatcagcaattaaacgaccagtttcttcgttagctgatgaaacagcagccacttgggcaatggcatctttactttcgactttgtgtgaaatttcgtgtaacttcttaacagcttctttagttgctaattcaatcccacgacgaatcccaactgggttagcgccggctgtgacgttcttcatcccttcacgaataattgcttgagctaaaacagtagcagtagttgtcccatcaccagcgatgtcattcgtttttgaagccacttcagaaactaacttagcacccatattttcaaaatgatcttctaattcgattgctttagcgattgtcacaccatcattagtaatttctggtgaaccgtaagctttttccaaaacaacgttccggccttttggtcctaatgttgttttcactgtgttggctaattggtcaacccctgccaacatttttgaacgtgcgtcttctgaaaatttaagttcttttgccataatttattcacctcaaaaaatttttttgtttattattattcaacaatagccataatatctttagcatggagcactaaatattgttgaccttcatattcaacttctgaacctgcatatttatcgtaaataacttcatcgttttctttaatatcaagtggaatacgtttgccgtcacttgttaatgtgccggtaccaactgcgactactttgccggtttgtggtttttgtttagcattacttgccaaaacaatcccacctactgtttgttcttcttcgtctttaacggcgataatcacgcgatcttctaatggttttaacacttaaaatccctccatcaattttacttttttagcactctatcatctcaagtgctaatcacaatttttatcatagcattttttcagaacattgcaagtattatgctagcacttttgcaatttgagtgctaatacgctaagctattgtcacaacaacctttgaggagctttcacatgacgctatacaaacaaaatttttcaattatcattagctatttgttcattttattgattcctagtgcagtcgtccgttttggtcatctatctgcctcgttttttctaatcacaaccattgttgattgcctcggtgccgcctggttactctatcttaatcaacgcacacaagccaatgccattgagcagcggcctttcccactcaaacccattatcatttggggggtgtgtggcattgtactggtcttagtaattcagattctcgccggcttcattgaacaaaacattctccacatcactgccaaatcgctcaacaccatttcactgatgaccatgatgcaacaacaaccgtttcttattttagcaacgaccatcgccgcaccgattatggaagaaatcacgtttcgcaaagcaatctttggtggattagccagtcgcttaaaccgcattttagccgccatcatttcaagtttactgtttgcttttttacatcaggacgggcatttgttaatctacacggccatcggtcttttcctatgttggctgtaccgcaagacaggttcgattttcaccacaatcatcagccatgctgggatgaacctgatcgtcactttactgtatctcaatcgttaaaaaaagcgttcaaacaggcggctactacgagcaacttgtttaaacgctatttttattcttgattttgttcatcagtataattatcgaggaagtaaatcaaagtttgtagttctttagccaaatcaacattttgaatccgcacgtttgatggcacagaaattcgaattggcgtaaagttcataatccctttaatcccagcggccactaattcatcggtgacttcttgagcttcatcaattggcactgttaaaatgacaatctcgatctgttggttcttcaattgttcggccatctcgtccattgaatagacaggaacaccggtttgaattgttccaatcatttcgggtttaacatcaaatgctgcgctaatccgaatattattggtttgcttaaagttgtagttcaataaggcgtggcctaaattccccaccccaatcaatgcaacgtttgtcaatcgatcttggttcaaggtcttcttgaaaaaatctagcaacgaagcgacatcatagccataaccacgtttgcccagtgcaccgaaatatgaaaaatcacgacgaattgtcgcactatctactttaactgcttcggataattcagtagaggaaattttagttttccctgaattgttcaaaaagtttaaatagcggtaatataaaggcaatcgttttgcagttgctcttgggatattattctcaaccatttgaaacctcctttttgatttgcttgtgaaaatagtgtagtacatactgaaatcatactgaattttcttgtgaaaagcaatatatttacaattttgactgtccatcgtttaaatctgttatgatagttgacagtagtattataaaaatgaacgcaattaactttaaaaaacaccgcacgaaaggatttttagccgtgatattattacaagttcaacaagtcgcacgcagttttggcggcgattaccttttcaaaaacgcacaactcgaagtacaagaccgcgcccgtgttgccctcgttggtccaaacggggctggtaaatcaaccttattaaaaatgattgccggcatcacaacgcctgatgaaggccaaatcattcttagcaaaaatgctcaagtcggttacttagcgcaagatagtggcttagactcaacccggacaatctatgcggagatgttaaccattttcgatgatctccgccaaatggaagcccaaatgcatgaactcgagaccgcaattgcggacacaaccattgaccatgctagcgaagaatatgcagccttactaaaacgatatgaccaagtccaacacgatttctctgaagctaatggttacggctatgaagccgaaatccgtggcgtcttacatggtttccaatttccagaagacacctttgaaaagccaatcagtacactatcgggaggcgaacgctcgcgactcgcacttgctaagttattgcttgagaaaaaagacgtccttattttggacgaaccaacgaaccatttagatatcgaaacactaacatggttggaaaattatttacaaacttatcccggtgccttgctcaccgtctcgcatgaccggtacttcttagataaaatcactaaagaagtctacgacatgagtcgccacacattgacccattataccggtaattacagccatttcttaagtttaaaagaagctaacctctcacttgaatggaaggcttatgaaaaacaacaagctgaaatcgataaacttcagacctttgttgataaaaacttagtgcgcgcaagtaccacgaaacaagcccaaagtcgccgccgtcaactcgaaaagatggataaattagaccggccgcaaaacgaagccggtaaaattcattttcatttcgaaagcgaacatccaagcggtaacgaagtattgcaagtaagcgatgccgctgtcggctattcccccgataaaatcatggtacaaccaatcaattttgaagtgaaccgccacgaacgcttagccatcatcggacctaacggaattggtaaatcgacccttctcaaaagtatcttgcaccaaattccgttcatcaaaggccatgaaaaagtcggtagtaacgtttcaatgggctactacgatcaagagcaacgcaatttacacactaacaaaaccgtcctcaacgaattatgggatgaacaccatacaacacctgaaaaggaaattcgcacactacttggtagtttcttattcaccggtgacgatgttttaaaggttgtgtcacaactcagtggtggtgaaaaagcccgcttactcttgacgaaactcgcgatgaaccatgacaatttcttaatcatggatgaaccaacgaaccatttggacattgatagcaaggaagtcttggaaaaagccctccgtgaattcgatggcaccgtcctcttcatttcccatgaccggtatttcatcaatcaagtcgccactggcattatcgaactatcagatactggtagcaaacgatacctcggtgattacgattactacctcgccaagaaagctgaagaaacagcttacgcagaagcagctagccaaaacagtgcaattatccaaccaagtgcccatgcacaagatgcctacaaagcaagtaaggaaaaccaacgtgcacaacggaaactagaacgcgaagttactgctttagaagaaaaaatggccgcactagagactaaggccaacgcaatccaagaacaaatgacccaagcagacgtaattactaaacccctcatgcttcaagaactacaacaagacctagaaaaagtccaagctgaactcgctcaaacagaatcagactgggaagaacaagcgatggcattagaagaactaacacaatagagtgcgtcaaaagccggttatgctgcgagcatcagcctaacaaggcgaatgcttgctacaagcaatcgtttgacttgtgtagctaagcacagaaatatgcctgcaccacataaaaaagggtagcgatcaatatcgttgcccttttgcattttaattaatttgtttgccgaacggacttaacgataacgccgctagcttaaagtgttgccggccaaatggaatcccaataatcgtaattgataataatagcccccaaaagacatggctcgcccacatcacaagaccacctaagaaaaaccaaacaatgtttaataaaaacgaacctgcaccccccgttgaaacaacggttgcgttaaacggcatcaaggtcaatgcgccaataaaacgttgtagcccgactggaattccaataatcgtaatactccaggcaatccccagaataaaccaaccgatagcctctactaatcccccgaatagccaccaaattaatgtaccaattaaactcattgaataaactcctttatacttgattgccttaattatacctgattcataaacaaaaaaagcggtagccgcctaaaaataggtcgctaccgcttttcttaatctttttttaaccgattaatgctaacgcttgtttcaagacagtttcgccgtccatcatgccgtaagccttcatatcaattacttcaacaccgattccttttggtgccaatttttctttaaattgaccttccatgaaacgaacttgagggcctaatagtacgcagtcaatttttttagattcgagttggttgtctgcatctgaagcgccagttgcaaaaatttctgcgtctaagccttgtgcttcagcggccttttgcatctttgaaactaataaacttgttgacatccctgctgcacaacataacatgattgttttttctgccataatgaattaccccttaaattttaattgattagaaaacgacaaaaggcttataaaaagcgttttcatttcttctatatttttagtataagcgctttctttcttaatgtcaattaatgttatttaaaaatatataagccgcccattttgttgacctatccccatcattaacctgtcacctgttattttatcgcatgaaaggtattttttatgctccctactaaacacaaaaaaactgctaaccaatgcctaaaaatcgtcggttagcagcttttagctattttattgtttagtatagaatcgttttaattttgtctggcaacgcgattgtgcccgtttcatctgttcaaacgtgcaatctagctgacgacacgcttgctcaactgctagttgccccgtcaaaacccgaaaggccactaactctaaagcagatagtgtctctaagtacgcccgcatttcaaccgttgactgatagtatgcaacggtatcttcagcgagcgcattgcattccggacaacaatcaaataacagggcttgctgatcgacccgtcgtttctgagcaagttctttgcgaatcaagtttaatacgtggtggtgaaagcgtaatttataaaaaccaccaaaacttttgccgcaattttgatcataacactggcaagtctcataacagacgattcgcgcttcttgtaaccaatcgtcctcatcaaataagcgaatataatatggagtaaaggtgcgataaaccattggtaggtaggctttaaataaaacatccaacgcctcagaatcgttttcaaccaccgcttgaattaagtttgcatcacgttttgctgattccatcaacgaaccacctctcacgcaaccccacgtctttatcttaacaagttatcgtatatttatcaagagaacgtttgtttaatcatctttttcagcacttagtgcatctcgcatctgtgcaagttgatctagttgcgccggattccacggcatattccgttgcaaggtccgatcatgataatgcttggcatcatggtcaatttcacggcgcgttcggcgaatctcacgataaaaatcgtgcgaagacacccgcaatgcgccccgtgaaaaaatcgtccactgctcagcttgatcactcgaaacaaccgtcacttgcgtaatcggcgacattaatttacccgctaagccttcgatataactgtccgctgtttcatcctcatcggtgaagacaacttccaaatcatactgcgcataactttgtttaatccctggcacatacattgcatcaaatactaagatgacttcaatctcacgaaacttgcgatattctgataatatctgcaataaacgatcacgcgcatctgcgagatgatcattttgtttcaacttattcagctcgggccagttcccaatgatattataaccatctgcaattaagatctgttttttcatctgctataccaaaggttgacggctattataagcctgatacattaaaacccccgcagcaacactcgcatttaaactttgcacatgaccgaccattggaatcgtcaacgtttgatcaacttcttttttaacaattggtgaaagccccttaccttcattaccaatgattaagccgattggtcctttagcatcccacttacgatagtcggtaccagccatatcggtgccaaaaatccaaagaccacggtccttcaatttcttaatttcttgtgttaagttcgtgacacgcgccactaggatatgttcgatcgcaccagtcgatgtcttagcaactgttgatgttaaccccaccgcacgatgcttaggaataataatcccatgcacaccaaccgcatcagctgtccgcatgattgaacccaagttgtggggatcttccaagttatccaagattaagataaacggttcttcttctcgggctttggccttagcgaaaatatcatcaacacacgcatattcaaacggtgcgattgctaagataatcccttggtgattttgacggtcactcaataagtccaacttatttttaggcacattttgaatgattagacgtttttctttcgctaatttcacaacatcgtggacaaagtcagccttcaagccatcttgtaagaaaattttattgattttcttcgcatcactggtcttcaatgtttctaaagaagcgtgttttccgatgacgaaatcagtttgttcttcaacaactgcttcttcgacgggtgctgctggtttcttgttagctggacggcgcgttggctttgccgaattattggccgtccgacgactattgaattcgttgttcttttgtttgaatggttggttattattttttctcatgggtcctcccagcgtcgacttgttgaatacaccagtgggctaattcagcgacgcgctcttgttgttcagttaagtatagatagccaaaaactgcttcaaagcccgttgaggtccgataagtcgaaacactcgtattcttggctttcgtataacttttggcatttctaccgcgtttaaaaatattcatttcttcttctgttaaataattatcatcgatcatcaaaccaatcaaagcagcttgcgctttagccgacacataatgtgtcgccacttgttgcaagcgcgttggtttggttaaaccgagttctagcaaatgggcgcggacatacacttcgtaggctgaatcgcccatatatgccaacgcaatcccgtttagttgtaaagcatttttcatgcgcgtctccatctcattccttgtggtgtatcttccaaaataatcccttgttctttcaattgatcgcgaatcgcatcactgcgggcaaaatcctttgctgcccgtgcagctttgcgttcttcaatcaagctttcgacctctgcgtccaacagttgggccgccttaaactcaacaccaaaaatggctaacaagcgcgttagacgggcagttaaatccactaacgtaccagcttggacggtagcccgttccaggtattgattactaagcttagcgagttcatacaattctgttaacccgttttgcacgttaaaatcatcatccatcgctgtcacaaaggcgtcttccaagcttgccgcttgtgcggcaatgtctgcgtctgcgcccgcttcagcagtcgcttggcggaacgctaagttatcgagggtcgtttttaaacgatccaggttcgtttgcgcttcagctaataatgattcactgtagcgaattggtcggcgatattgcgtgctactcatcaagaaacgtaatgcttgtggattaacttcttgaatcaaatcatgcaccgtcacgaagttgccaagagacttactcattttttgatcatcatccccgactgtcacaaagccattgtgcaaccaatagttgacgaaatgtttaccagtcttcgcttcactttgagcaatttcattttcatgatgtgggaactctaaatcttggccaccgccatgaatatcaatcgtgtcgcctaaatatttggtcgacatgactgaacattcgatatgccagcctggtcgccccttaccccaaggtgaatcccaagcaatatcggtccctttttctgacttccaaagggcaaagtcgattggatcttccttacgtagggtttcttcggttgctgtatgttcgctggccccttgttcgagctgatcgatatcttgaccagctagatggccatagtccttaaatttacgagcacgatagtaaacatcgccatcaacggcataggcataatctttagcaattaagtcttgaatgaacgcgataatttctggaatgttttctgtcgcccgcggattgagtgtcgctgtttcaatattaagtgcttgggtgtcttctttaaaagcggtgatatagcgttcagctaattccggaaccgtgatttgttccgcattcgcagccttaatcatcttgtcgtcaacatcggtaaaatttgagacataatcgacttgatagccacggtattcgagatagcggcgaatcgtatcaaaggcaatcgcactgcgcgcattaccaatatgaatatagttatacacagttggtccacagacatacattttaacgcggtctgcttgaatcggtttgaagacttctttttgacgcgtgagggtattataaacggttaacatcgaatcttcctttcttaaacgtgctcttgcaagcttatttctgcgcttaaccaaatttgcccaattggcgattgcatcgccaattcgtcaaatccagttaatgctcaaaatataaccatctgctgtcgcactcttcttctaaacgtgctttttgaaactgacttctgtgctttgctccataccgcaaacgatcgccggtggcgctccctcacggtattaggcaaatgctcgaagtcaaaccgtttcaaacgcactcttccaaataaaaagcgtcctttgttggttaacaaaagacgccgattgagcgtggttccacttttctttgcaaaaatgccttgaacaggtaacggtgtcccggctaagtcacaaagtcacttggcatttcagaggtgcatttcgatggggcaatcggctttcttccagcaattcgaaagctctcttaacaattggcatcatctacttattctcttcatcaattttaacggtttagttggtctccatgatacagattattgacgaccgtgtaaagtgttctgcgtggctatttttctttcaagcctttttgttgatgcgctggtctagcaaaaatcatccgccccgcagcggtttgaagcgcacttgtcacaatcacttctagcggtttatttaagtaatgttggccatcttcaacaacgatcatcgtgccatcatcaagataggcaaccccttgttgccgttctgttccggctttcaccaccgtcacggtcatcgcttctccaggtaaaactgcaggcttcaacgtattggcgagttgattgatattgaagaccggtacgttttgaaattcacagaccttgttcaagttataatcattcgtcacgacaatcccatcaagtaattttgccaatttaacgagtttactatcgacttccgttaaatcctcgaaatcaccgtcgtacatttcaacagataagctatcgtctttttgaatatcgtttaagatatccagtccacggcgcccacgtgcccgcttcaaattatcagcggaatctgaaattaattgtagttcatgtaagacaaagtttggcaccatcaatgtgccttcgataaagcccgtcttagcaatttcttttattcggccgtcaataatcacacttgtatctagaatcttatacttacggaaattatcgccgactttacgttctaatacatcagcattgcgtttcttaggttggatcaaacggcgccattcttccattcgcgttgtcccaattcgaaagccgagataccctaaagcaatcatcaataaaatgggtacaactgtatttaatgcaaaaatgggcatccggtatagcggaatcgaaacaacgtttgctaataacaatccaattagtgaaaaaacactcccaaataaaataaaactaggtgattgtttcgttaaggctttttcaagccggtgcatagctctcaacattggtgttgccagcgccaagaataatagatagaaaataatggcccctaaaatgacgttagtaataccgttattgagatacatcatgtcttccaaatgaactaatggccaaaatactgggaacgccgtaattccaagcgcacctcctaagataatgaacacaattcctaatattctttttttagtaaatcgtttttgttgcatcgttcaacctcctctcgctccaacttatgcctagttgaatactttctttaaagtttctgcaatcgtggtcacaccaatcacttgaatatccgtcggtgcgtcccacccttgtaagttattctttggtacataaatacgtttaaagcctaatttagcagcttcaatgacgcgttgttcaatccggttgacccggcgaatttcaccagtcagaccgatttcaccgacgaaacaatcagttggtggaatttctttatcccgatagcttgatgcaatcgaaacagccatcgccaaatcaatcgcaggttcatctaatttaacaccgccagttgcttttaaatacgcatcttggttcgataacatgagactagcacgcttttcaagcaccgccataatcaaggagactcgattatgatctaaccctgaagacgtgcgctttgcattcccgaatagtgttggggtaattagggtctgtaactcgaccaagatgggtcgcgtgccttccatcgaaacaaccacggctgaacctgtcgcccctgccaaacgttcttctaggaaaatctcggatgggttcgcgacttcttttaagccggcttcacgcatttcgaaaatcccaatctcattggttgaaccaaaccggttcttaaccgagcgaagaatgcggtaagtatgatgcgtatccccttcaaagtacaacacagtatctaccatgtgctccaaaatcttaggaccggcaatagcgccctctttagtgacatgcccaaccacaaaaatcgtaatctggttcgtcttcgcaatgcgcatcaattcagcggtgacttgacgcacttgtgaaacactaccgactgcggaagtcacttctggttcgctcatcgtttgaattgaatcaatcaccacaaagtcgggtttcattgtttcaatctgatgccgaatattgcccatatccgtttcaggatataagtaaagttgatcgccattcacatcaagccggttagcccgcatcttaatctgggatgcactttcttcaccagaaacataaagaatcttaccaaccttttcaagttgtccggaaacttgtaggagtaacgttgatttcccaatcccaggatccccaccaattagaatcaatgagcccggtaccactccaccgccaagcacgcggttgagttcgtttaattcagttttaatacgcggttccttttgaatattaacggtgctgatttgttctggttcagttgcccgccctgaaatcgtaaaacttgatttcgcgctagctgcaggttgttcacgttcttcgaccatttggttccaagcgccacaattcgggcaccgacctaagaatctcggggaactatagccacaattttggcaaacaaactgagtcttaattttagccacaaagattctccttcattatcgagattagttttattttaacataagtttgtgaattttcggcgacctagcgattaacgtttagcgaccagatgagccaaacccacccgttcgtttggtggttaccgtcgcttcatcatctgcgactaaatatggcatgaagatgccttgtccaattcgttcaccttttttcaagataacatcccgcggactgaagttaaccatttggataaaaatttcaccttcgttggcatcattgccgtagtaatccgcatcgataatgccgacgccgttgggtaaaattaacccttttttgagtgggttgcttgaacgattggcgatcattaaatattcgtcgtcttgcatgtaagccttaatcccggtcggtactagaaagggtttcaacgtttttgatgcacgttcaaaatcgtcatccactaacggtttgccatttcgaatcattcggaacaaacgcacaaagttgtaatgccagattgatggcaacacgaagtcctccgcacaagcaaagtcgtagcccgccgaatgcgctgttgaacgcaccggtaaactcaatcccgcctcttggtatttggtcacaatttcaaagccgcgttttttcattcctaaaactcctaatattatcgcccatttgggttctttttgtaccactgtatcataccatgaaaccgcggaggctgtgaataatgcctaagactgatttaattaaaaatttaacaaaaagcgcccaattaaagcgtttttttcgtataatagatttattaatacaaaaggggtgtcttgatggataagaatgcaatgaaaaagatggcagctgaacgctcagtggattttgtcgaagataacatgattttaggacttggaacaggttcaacagtagtttacatggtggaagccctcgcaaaacgggtacaagcagaacacctcaacttaacatgtgtctgcacctcaattcgtactgaagaacaagccaaatcacttgggattccggtcaaagcactcaaccatgtcgaccacattgatttaaccatcgatggtgccgatgaagtcgatgccaacttccaagggattaaaggcggcggtgctgcgcacttattcgaaaaattagtcgcaactacttcaacccgcaacatttggattgttgatcaagaaaaagtggtcgatacaatcggtcgcttcccactaccagttgaagtgattccatttggcagccaacaagtgttcaacaaaatggctaaagaaggcttaaatccagaattccggatgactgcagacggccaacacgtcttaactgattctaaaaactacgtcatcgatttacacctcaaccaagtccaacatccccacctactggcatcatggctcagtgaacaagtcggcgttgttgaacatggtctattcctagacatcgtcgaccaagtcgtggttggcgcacctgatggcgtgaagattttaacagcaaaataaagcgtgcgtttaaaggagatttgacactgtgcactagcacagtgttttaaatgaccgacaaaatcggtcgtttgcaatacgtagctaagcgcaagcgtcagctttaaaaagcacgtttccaaacgaaccctcagcggttcgtttttttgtgtcccgtgctctcatataaatcgttttctttcacatttatcaatcaccattcttttagctttatccccgttattcggtttacatctcccatctaatcaactagaattaaactaattcaaaaattaaggagtgattagatgacccaagaaattacacataataatttaatcaagatgcggaccgctttagctggcgtgccacaagcaacgacgctcaaaaatgctgtgatgacgaatggcattaacgccgttagtcaacgccccgatgctgccgtcacccttgatccaacctactcaatcgacctccccactggtgatgtcagctttcaaaaaaagagtgggcggtgctggttatttgccactctaaatacattacgccacgatttcgaacagaaatatcacgttaagaatttcgaactctcccaaaattatctatctttctgggatcgcatcgaaaaggcgaacctcttttatgaaaagattttagcaactgccgacaagccgattacggatcgcgaagtcgccttcaccctcgctggtcccgattttgacggtggccaatgggacaacgcagtggcactgattcaaaaatacggtgctgtgcccaagtcggtcatgcccgaaacttataacagtgacttaaccactgaattcaacagcactcttaatttgaaactgcgcaaagatgcgattcaattacggcaacttgttgctgacaacgctagcgaaacaaccatcagtgaaacgcggactggtttcttaagtgaaatctatcggctatgtgtttacgcattcggcgaaccagtcgaaacgtttgacttcacctatcgcgatgacgaccaaaattaccatgaagaccgcggtttaaccccgcaaagtttctatcaaaaatatctcaatcgcaactttgacgactacatcaccgttgtcagcagcccccaaacaagtaaacaatacaaccaactctacagtttagaatcgcaaaacacggtagtcgaaggtcacccaatgcgcctcttaaacttaccccctgaacgtttaaaagcactggctatccaatccttacaaaacggtgaaacaatttggtttggcaatgacgtgctcgcggatatggaccgacaaaaaggctggcttgatcgcaacctttacgactattctggactctttggtttcgatttgacgatgccaaaagaccaacgacttgactaccgacaaggcgttgtttcccacgcgatgaccctcaccggtgtcgacctcgtaaacgaccaaccaacgaaatggaaagtcgaaaacacatggagtgccaaagtcggtacaaaaggttacttcagtatgagcgacgcttggtttgacgactacgtttacgaggtaattgtcaaaaaagcgtaccttacaaaagaagaacaagccgcactcacaaaaaccccaattaagctagacccatgggacgcactgcaatagagtgcgtagtaagccgagtttatcctgaggattaacacagaacggcgaaggattgcgccagcaatcgtttgacgttcagggttaaccggaaggatatggcttacggagcacgtttcaaatcagagtgcgccatcaatgggttacttctgagcacttacagcacttgacgaattggcaatgcagtcgccgatttggcaagtgaggtaaggcggaagaagttgttgatgaaagcacgtttcaaaaaaataatgccattcaaaccgggtaatttaatttaacccaccaaattttagaggaggttttccacatggttcaacccattacagcaaaagatattcaacaattcaaagccgatttcaaggcaacaccacaatccaacacaattaaaaatgccattatgaacaacggctttttagccacgagtgctaataccgattcaaaagccaaaatggcccccgttttttcaatcgacttagataccggtgccgtttccaatcaaaagcaatctggtcgttgctggatgttcgccgcgttaaatacaatgcgccacagcctccaagaccaattcaaaattaaggatttcgaattgtcccaaaactacaccaacttctgggacaaattcgaaaaatcaaactacttctacgaaaacgtcttgaagactgccagccaaccaattggcgaccgcaaagtcgacttcttaatgacaacgccccaacaagatggcggccaatgggacatgctctgcgcactcatcgaaaaatacgggattgtacctaagtcagtcatgcccgaaacatataatagtgaaaaatcaggcgaactcaacggcgttttgaaccttaaactccgtaaagatgccgttacattacgccaattagtagccgacggtgttagcgaagccgacatccaagctaaaaaagacgcgatgttaaccgaagtttaccggatgctcgtttatgcattgggcgaaccacccgttgaattcgactttgaataccgcgatgatgatcacaactatcacatcgaaaaaggcctcacaccgcaaacgttctatcaaaaatacgttggctgggacctcgaaaattacgtttcattgattaactcaccaactgccgacaaaccatacaaccacttatacagcgttgaaatgttgggcaatgtggtcggtggccgtgaagtgcggcatttaaacctcgacatcgacaccttcaaacaactcgcgattaaacaactacaagcaggtgaatccgtttggttcggtagcgatgtaggccaatcatctgatcgcaaactcggcatcatggacactgaaatttatcaaaaagatgccatgctcggcatggatctttcaatttctaaaggcgaacgccttgattacggtgaaagtctcatgacccatgcgatggtcatcaccggtgtcgacctcgtcgatggtcaaccaaccaaatggaaggttgaaaactcatggggtgacaaagttgggacgaaaggttacttcgtcatgagtgatagttggtttgacgaatttgtttatcaaatcgtgatcaacaaacgcttcttaacggatgaaatgaaacgcattgaaacagaagaatacgatcacccaaccgttctcgcaccatgggatccaatgggcgcattagcaagtcgctaaacagtaaaaggggctgagacaaaagtaaattttgtctcagccccttttttgatattagaactttaatcgtctaaacgtgttcttataagtcatccccttccggctaatcctcagggtatcccgacttatggcacacgcttttttatgttccagtacagactgcgagcaagctatcataataaatctgcatcatcatttgccagtcactgaattgaagccattcatcccctttatgggcaatccctttttgacctggaaatgatgggccaaacgcgatgatgttcggtaacgcgcgcgcataagtcacgcccgttgttgtgaccggtgtgccatccaaaccagtatctgccgcataaatcgcagagggttgttgaataaatggcaatgttggatcagtaacttgcgatggataacgccgtttaaccgtcaacgtcatccccggcaacatggcagctttaatcccagttaacaactgatcttccgtcactgggattgggtaacgacatgtcagatgcatacttaactgttgggcttcaatcgataccccataaaaagcaagttgcaatgctcctgatgcttcatcttgataattaatccccaagttttccccagttgactgcgtcccgattttagcggctacccattgataaaattgacccgtttgaccagtgagttgacttgcatcggcaactaacttcggtaacacattatccgccatttcggggcattgctaggtgcctttttgccgtgataagttttaaccgtgccatcggccaaaatcagctgtgcatgatctggcagataacttttagcgaaccgtccttcaatcgccgtaatttgttgctcagagccgtccgtaatcggtaacgctaactggacatctaacaagccccgttcgccgtagacggctggaaatttacaatctggtgtgaattcggcatatggtgcggaatgttccgccaaataaattggcatatcctgactcccagattcctcatcagtgccaaaaataattcggacgcgttgtttaaatgttatcttttgcgtcttaatcagatacagggcaaataatgtcgataaaaatggtcccttattatccaaaacaccacgcccatacagcatattatctacctgagtcagttcaaatggtggataatgccaatcatcttcaacatccacgacatctaaatgaccaagaatcccaaaataagttggcgcttgcgtttcgtctggtccatattctgcccagccaacacaattgccgacttgccccgtcctaaagcccattcgatcagcaatcgccaacactgtttccaatgcgcgtttcggaccaattccaaacggcgcttcaaacgtttgcgctccacacacactcggcacgcgtaacacttcccgcaagtccgctaagaactcatcagcatgtgcttcaaataatgccttaaaatctgctctaatcggtttcacaagaatggcttctttctattaaatttcgtcaaaattaatatcaacatcgtctaagccagccgcttcggcttcttccgccaaatactgccgatcaatcatcatgataaatggatagtaaattaaaattccaagcactaattcaaataattggaggactcaccctgtccaactcccagttgaaagccacccagaaataatcggtggtgttgtccatggcaacataacgccatttgtatacggtacccatccgagttggaatacaatccctgaaatcaatgtatttaaaaccggtacgataatgaatggaattgcaataattgggtttaaaacgactggcaaaccgaagataatcggttcgttaatcccgaaaataccggggacaattgccaacttacccaattctttgacgcgttttgacttgcagacggttaacatgaggattaagagtgagagggtactcccaccgccaccgtatgtggtgaagatgtcaataaattgttgggtgaaaatatgtggtaactgcgtatgattctggaatgctgttaagttatcttgcgtcagaacgaagaaaattggtgaccacacactgttggtgatagttggaccattaatcccaaaacaccagagcaacattgcgatgaagttataaagcaatacagatggcaatgagttgccggcaccttttaacggttgttgcagtaacgtgtagatgaaattgtaggccgtttcgaaactcgaaaggctaaaaccaattctaattaagaagaaaactaataccactaagccagccggtagtaaggcatcgaatgattcactaactgcaggtggcacaccatctggcatcttaattcgccagttgcgtttaatcgcaaaacggtaaatttcaacactgactaatgcgataaaaatccctaggaaaatcccgttaggtcccaaatacattgtttgaatggcaccgattgattttttaccaacggtgacaacagtcggtgtcaaaattaagaatgaaataatagcaattgcactggtatgaatcgcttgtaaccctcggtttttaccataggcataggatatcccaaaacaagcaagcaaccctgtaaaactaaacactaaattagaaacagcactaaaccattctgtccagtgcggccctaaaatcccactccaaaattcagtccaaccaggaattggaaaattcccaatcagtaagaaaatcgatgtcacgataatcaatggcgtaatgattaagaaaccatctcgcaatgatcggagtacaacattattccccagtttaatcgcaaccggcatcaaaatctgttcgagtttcttttgcatcggttttgcctccttttaataacaatattggttaataaaatcagtaaaatcagcgccttcaaccttcattttgcataactgcaatgcgtggtcgattgaatccgaaagaccagtaccacccttttttggtatcttcacaatcgttatttgatcttgatactgttgaattaaatcggcattcttttcgatcgcggtcagcccaacaaccggaattgttgtttctttttgaatagtggctgctaattcacacgccatcgtcgaaaagtcccgataatcataggtcggtcccgcaatcacaacgtctgcacccattttctcactcatcttcgcaactttccgattcacttcggctttgtttgcctgataataatcagttccgcaataaaaggtcccgataatttcagagtccattttttttaatgccttatcgagcgtatccgcagcacccatcgctaatttttttccacctaaaggggtatcccctttttccttaccacctaatccagcttggatttgatccaacaagacaattactttcatttaaaaccctccttttaatgttcacgttgcaagatgttatggaacgtgtatttatcagcacgataatgcgagttatcataaagaattggataaccgtccattgaatacgcaaccgtgtgggctagaaaagcgggttgccctggagaggtctcaagtaagtcacttaagcctttttccaatacgactgcttcgagttcttgattggcatacccgattgggattgtttgctcaatcaagcggtagagtgacccttgtgcctcatgggccgttaattctggtagaattttttgtttcagatagatttgttcgtgggtcatcgcttcaccgtctgccattcgcaagcgttcaatctgccaaactggctcctgtggtgctaaatctaacttggaggccacatagtccggataaacgattgtccggcgtaaatctaacacccgcgtgctgacatccaattgaaactgtttggctgcttcggtaaaaccaactaaaccagatgaaccactcgaaattttactttgtgttgcaagtacataggtgccacgatttcgatcgcgtaccacgacatgttgtttaaccaatagatcgattgctttgcgaattgttagccgcgtcgttgaaaattgattggctaaatccgtttccgatggtaatttctgatggatcccatagacccctttttgaatgtcatctcgtaaggcttctgcaatttcaacgtatagatacttaaccattccaaccacttcctctattcaactggtgctttaatccgtttcgcgtaggcttcaagccattctgctgaaatgggttcgatcaccgtcgtttgacttggccctggattagccataaaaatttgtggtgccgcatcttgattgccagctgcaaacgtaaactcaacgttcgtcgccacgccccattcaccttgattatttaaggcaaccaacgaaaactcgccagctttgccgtagcgtttttttaatttctcaacaaacggatagactgcttgatcacacgctgcttgtggtgataaaccggtccccatcaggcgcacaatctcatatgaaagacagcccttcattaaatcttcgcctaacccagtagcggttgcgccaccgatttcgctatccacgtaaaagccactgccagataatgcagaatcaccagtccgccctggttttttcataaataatccagaagttgacgtccccgctgccataccggcagcttgatccaaactaaccatgccaactgtatcgtgaccatcatatgggctaagatttttttcgttaatttctttaattcgttgcatccagattttgtgtgcgcgttcggtcaacatattacggctttcaaaaccgttgaacatcgcatattgtgacgctcccgcaccaaccaagaaactattaaaatgattgtcacttaattgacgcgcaactgagattgggttcttcacatcactaattcctgcaacagcaccaattgcaaaagtgttgccatccatgaatgccgcatccatctccactaagccttgcgcatttggcaaaccaccataactgaccgatttaaagaaggggtaatcttccacttttttgatagcggtttcaattgcatccgtactttgcccaccattttttaaatcagccatcgctttttgaatcccttcaaaggccattcgccaagtcccaatcattgcatatgtcataactctcatctccgcatgtaagcgttttaataatcacggtataatcaaaattgtatatacaatcaatactttttttgaaataaaaaagccaccgcagtgacttttcatttaaagatagaggccaatcaacattcccactagccaaaaaccgttaaagacaattagattctgaaccgctgtaccaaatacaacgcgtttttcctgactcttctgtaatgcaaacccattacgtaacaaagttgggccactcgcaaaagctagcgctgctggccatggatataatttcaggccaatcccaacaataatcaccacgtaacaactatacgcactaagttgataaagttgaatgccgcgcttttgaccaatgtaactgattaatgtgtgccgcccattctctaaatcgactgtgtaatcacaaatattgttcattaacatcaaattagcaatcaggaagacagttggtaaactcgccacaaacaccaaaatcacattcagccaattcagttggaataacattaacggcccatcaaagcgcaaatcgaccaactgatccgccggaacgttgacatacaccgtcaaaaagaaattaccgaaccctaataccagactcgataacaactcacccagtggtaatcgtgaaattgggaatgggccgtaagtatataaaatcccgattaagatgaacagaacactgatggctaacacaattaaatttgtgcgccagaccagaatcagccccagaacggttgccgtacttataaagccgatcaaccagcgtaaagcaaccttaggggcaatatcttgtcgtcctaatgcactggttgattgctggagcgtttcatttttagcgaggtgaaagtcgttgtaattattccatcccgttgtgaagacatcaattaacaccaatgcacagaagtacaacacggtattgatcggatcaatttggtggaaataatacaacgtaaaaaagaacccagccataaagggaatcacgctaccaactttagtgcgtaattcgataaaatctaaaaacgccttaacagacatctattccgcctccgataacattcaatagtcctattctaacagagaatgtctaacaaataaaaaaagagtcggttggaacaaaagtaacttttgccctaaccgactctttcaacagccgaaatttgatcatctaaccatgttctatctgaacagatcgcatacgctgtttgattctattttgttttcaaatcttcaatcgaattaatattcgtcatatacttcggtacagctaaaccgaccttagcaccctctaagttcggacctaagtcttcaatctgacctttgtaatccttgtagtataaaccagaggtcttcggtaaccatgcggaaacttgtgcatcggctgctttagttgcgactgacgcccacatcggttgaatttccatagcttgaatcgttggttgataaccttgttgacgtaaaacttcagccaccacgttagttgacgcgatttctgaatcccaagccacataggttaacttaattttcgtgccatgaacctttttaacacccttagtccactcagcaactttttctggattgtcttgaatccaatcgcgcgccgccttttcaggttcaacaccgtcattgactttaagcattacggtcgacatttcctttggcgtccaatggaatcgatctaagatggtatatgcttctggcatatccttctttagccccttacgaacaaccgtattaatgtgttcagcttgaccaaaaacatttttggggtcttttaaaaacttgattggatatttagtaaacatccaatgtggttgccaaccagtaatgacgattgggcgtttatccgcaatcgctttgtctaacgtactggtcattgccgcagttgagctggtttgcaactgccagttctgatcattcaaatgatacttgttaattgcagtttgtgtggatgccataatcccagcacccgcgtcaattccggtaatcgtgtaattaatttgaccgcctaatttctcatcggtagcgtacggcttagtttgcgaactgcaggccgttagaagtgtgacgagccccactaaggtgaaaaaagctattaatttattcttcttaatcactgaatccctccttaatgtttacgttgccggttcaaagcttgggttaaacgatcaataataatcgctaagattacgattgccaagccggctgcaaaaccgcccccagcatcattccggccaacagcaaagtaaactcgtgttcctaagcccattgctccaatcattgacgcaatcacgaccattgataaggccaacatcatactttggttaaccccagccattaaggtcgatttcgccaatggtaattgaaccttaattaacttttgccattcagttgagccatatgaatcagaggcttcgatcaattcggttggcacttggcgaatcccaaggtttgtcatacgaaccgttggtggcatggcaaaaatcactgatgcgaaaacgcccgggaccatcccgataccaaagaaggcaacggctggaattaagtaaacaaatgccggcattgtctgcatgaaatctaagatgggtttaaatattgcctgggcaatatcgcttttggccatccaaattccaagtggcaccccaattacgagggaaatcagactcgaggttaacactaacgttaacgtttgcgtcatatcccgccagaaatcaaggttccaaatcaagagtaggccgaggacttcaaagataattaaaccccattttttggtgtcgcgattcgctaaataagtgacgccagcgataatcacgatgaataaccagatggggattaaatcaaacacccattggaaagcgttgataattccgccaataaaattcgttaaaccattaaaaaagccagtaaattgtgtcagccaatcgacaaagtgatccatccaattggcaattggtaatttagcaatcgtcattaaattaagcaaaatggttcacctcgtttcctgcaagtgcccctaagacggccccgcgaataataatcccacgtaattgttgcttatcatttaagacagcaaacggaatgcccgtttgcgaaatatcatctaagatatcagcaattggtgtctcttcatcggttgttggaacttcagtattcacgattgattgcaaatcacgactttctttgcggactaactcaagtacatcacgcgcatcaataatcccaactaactcacgtttactgttgacaacgtaagcattagaaacttcattttcacgcattcgttttaaggccaaacgagggccatctttttcaatattaacagtcgttgggcgaatcataacgttgccggccgtgtaaactttactacgatcaacgttttcgatgaatttctctacatactcgtcagcaggccgtgtcaagatatcttccggtgtcccggtttgaacgatttccccatccttcatgatcatgatgtggtcgccgattttgagcgcttcatttaaatcatgactaataaagataattgttttgtgcatcgtttcttgcaagtcgagtagttggtcttgcatgtcagaacgattcaatggatcaagcgcagaaaaagcttcgtccattaataaaatctcagcatcattcgctaatgcacgcgctaaaccaacccgttgttgcatcccaccagataattgtgtcggatactgatcgccataaccatttaaaccaactaaatcgagtgcttcattcgctttttgttcccgtgtcgccttatcaatgccttgaatttcaagcccatagtctgtattttcaagaatcgttcgatttggaaagagcccaaaattttggaataccatgctcatctttttacgccggacttcacgtaatgccttcttatcaatctgcattaaatcctcgccatcgattaatacactaccttcagtaggctcaatcaaccggttgatcatccgaaccaatgttgatttaccactcccagatagtcccataatgacaaaaatctcgccagattctacttcgaagttagcccggtcgacaccgattgtcgcacctgtttcctttagaatcgctgcttttgattttccttgtttcagtaattctttggcacgcggcacgcgcttaccaaatatttttgttagatttttgacttgtaatttgacagtcatagaatccccctttgatttcattttctgaaaactatatctaaaaagtatacaggtttattgtgaaagttgcacaccgtccacttttattctcattttattctaatgtgatagttaggtaaccaactttctttaaaaattaaaaaatcgctagatggggctttatgttagtctttaaaaatcagattagttctaaaacggaaccaatctgaaaatgcaactattttcctttgtacattaaaattaaatgagaattaatcccttttaaaattcacaagcccttaattaggccatcaaaaaaagcgttgaccaaatcggtcaacgcttttaaaaaatttagccatgtactgcttttcgttgatagcgatgatacaaagcaagggccataatcgtaaagacaatcggaccaatgaccatccagaaggcatctaaatattgaccttctaacatcggttgaataatcgtaaaggcaattccgaagacaaggactaagtcgaccacaatcgtcaccgccttaacagcaactggtgatttaaagaattcgtaaggccgttccaaatctttgcgtgccttgaaatatggaaaggcagtcactaaaaagaggtatggcaacgatgttgaaacgttagacatcaaagtcaagacattatagaagtcaccggcagctttaccaccaaatgaaataaccgcgattaaaatgcagactaataatgcttgcgcccacattgctttttcaggcatgccatgcttgttaacttctgcaaagccgttcggccagagtgctttaggtgtcccgagtacaaatgactttaatggtgaataaatcaagacggcaaatgcgcctaagtaactgataaacatgattaaaccggtaatccgagcaaaggttgttccaatcgtcatcgcaacgggtgtcgtcatcccaaaggcatggccgaattgataacccaagttttgcataagaacataagtaatattgcccatgttagctttattcccgctcaagacttgttgccagttcgttgagatgccccacataaagattgcaaccgcgtagattaatgtaatgaagactgtcgcaatcattaaccctttagggaaagtcttttcaggctgatccatactatcggtaacaccgcccatggcttccatccccgcgtaagcaaagattgagaagacaacaaatgataacatcccaattggtgtttgatagctactcatcggactcttaacaaaggtcgtcgtcccatgaatcggttctgccaaatgaaaacccgttttaaaccaaatcgccacactaatcactaagaatgcggcgaataaaaaggcaacggccatcccactgaatgacgcaaacttttgaatcttatcaaccccacgacttgataggaaagttaataataaaatccaaagaattcctaagacaccgaccacttgagtgccattcatccctaataaatgccaggttgctgtttgatctgaaccttggaggaacgttgaaaacggcacccacactttagcagctgttgacaccatccagacaatccatgacgctaaccagatgaacgtcccgatgaaagccgcctttttaccaatggatgcttctaaccaagaatagatgcccccgcgtgattctttcaaagaagaaccaaattcagcaaacattaatgaagttggtaagaaaaagaaaattgccgctaagatataccaaataatgctggcatagcccattaagtagaaagcaattgtggtattcgcaaagccgaagattgacccaaaaatcatcaatacgagaccttgaacgttaattttttttgatttcgccatttcaataagtcctttataattgtattaagtagaataaatatacaattcaaagggcataatgtcaattatatttgaataaatcaaccgtttccagcctttttattcatgtattcataattatatacaatttacgccacaaaaaaagacgttcacttttagcgaacgtcgattgccttatttaatgttggcaaccttagcgactttgccactattgacactcgcgctaatttccccttcttgaccgttattgataacaaattgatcggttgcttgacaccgtgggcaagttgtttcaatttgaaacttggtagagccatctgaattatcttctagtgctgtcttcgtcgtgatttccatcgctggatgttggcacttatagcattgaaagacaataaaacgccgttctacaaattcatctgctaaactcatgtgattcatcctttcaactagcttatttaagttcattctagcagtctgctattttttagggtacctttttgctcacgtgtcgttttctgaaagcatcccttagaaatgaatcaaaaggcgaacgattttaaagtttaaaagcattatggtatgtgatatacttacaacacaccatctagaaggagaggtttaaaagtttgccaatcacactaaaagcaagttatttttctgcaaattcaccaaattatagttcatttcacgaatattcactgatagaaatcagtgataatggtcaaatcacaaacattattcatcaaacggcgtcagaatactctgagcgattatcagctgcacgccaacatgaccacttaatcacactcgctcccggacacttcttgttaccaggctttatcgatctacacaatcatgcgccacaatggccacaagctggaattgcccttgatcgccctttagctgattggctcaatcattatacctttcctcttgaagcgcgctacgccgatttagatttcgccacacctgtgtatcaagacttagtgaccgaaatgctcgctaacggcacaacaaccgccctatatttcggaacaattcacaattctgcgaatctacgactcgcagaaatttgttcccaagcagggcaacgggctttcatcggaagtgttgcgatggataatccagatcaaacaccagactattatcgtgatgcttctcctgaagaagccattaataaaacacaaacttttgttcaagcaattcaagatacctatcgtaatgggttcattcaacccgtcattaccccccgcttcatccctagttgcacaactgaaacacttcagcaactcggtcaacttgcacagtcccaacacatcaccgttcagacacactgcagcgaaagcgactgggaacacgattatgtgcgcgaacgttacggccatacagactctgagatgttgcaatcattcggattattgaatcaacattcggtattagcacatgcaacacaactgacaactactgaccaaagtatcattaaaaccgaacaagcagcgattgcgcactgccctatctcaaatgcctattttggtaacgggattctccccgcacacgagttacttaatcaaggcattaaaattgggcttggcagtgatatcgccggtggttatacccctagcttatatgccaatttgcaacaagccgtaacggcctcccaaattcgacaagacggggttgacgccaccattgcggctgaccaacgcggtgttgcgaacagtcggatcagtgctaaacaagctttttatatggcaaccgtcggtggtgcaactagtcttggcattcaagctggtgccattgaatcgggattgcttgctgatttccaaatcgttcaagcgccaccacgctttgcaagtcttacaccagatgaacaactcgaacaacttttattccgccacaccaaacaccaaattaaggccgtctacgttcaaggtaaactggtccacgaaaaggagcacaactggtatgaatgaacaatctcaaaaattaatggtcggtcctgacgagccgatttcgaatcaagaagctggcttcttaggactacaacacgttttagcaatggatgtctacgttccccccgttatcattgccggtttattggcgatgggtcttgatgcaaaagccggcttaattcaagcgacattccttgctgccgggattggtacgattcttcaaaccaaattttttatgaaaatgcctgtttcccaaggcccttcatttgttccaattggggcaatcgccgggatttactttgctagtggtgctaaagacggcgggatggcaacggtgattggcgcttcaattgtcggttcaattctgttaattcttctcggcgtcaccggcctcttccaaaaaattattaacagcttagtcccccaagtcgtcggtggcacaatcatcaccatcgttggtctttcactgatgccatctgctttaggtgataacattttcaaagcacagggcaatatcaatgagaacttactcctggctgttgtgaccgtcgccattctaattctttgtgtttcgctaggtatctacttccctaaattacaaaaactcttcaaagttagttccatcatcatcgccttattaggcggaactgttttagcaaccatgcttggtaaatttgactggcaaagtgtgaacgaagcgagttggtttagcttgccaagtttcaccgcattccactatggtatgcacttttcgatgacagcaatcatgaccttcgtcattatctacgccgttttaatgaccgaaacgaccgggacttggtttgcaatgagtgccgttacggattcgcccatcagtaagaaacaatggaatcacgggattatcggtgaaggaattagctgtttaatcgctgcactcttaggcggctcaccagttacagggtatgcaactaacgccggcattatttcaatcaccggtgttgctagtaaaaaagtattcgtttctgccgggatttggtttatcatcttcggcttctttaataaattagcggccttcttatcagcgattccagccccagttattggtgggattttcgccatcatttgttcaactatcatgctcaacgggttaaatgttattcgcacactacacacccaagaacgtgatatgtacatcatcggaattccaatcattctatgtatcgccatcatcatcatgccacaatcattggtgaaagcaacgcctcaaatgatccaatacttacttgaatcaccaatttcgatttgtgcgcttgccgcaattattctcaacttaatcttaccaagagacagacaaattgcgtttaattagactgaaataaaaagaagccccctgataaaaaagtttatcagggggcttcttttttcgtaaatgtatttcccgattgagacagcacactttttttaaacgtgctccagcaggcatattcctgtgcttaaccaaacttgtcgcatcggcgattgcagacaaatccagttaatactcgaaatataaacgcctgcttgcgcactcttttagacactgaccattcgaatcgtcatgatgttcttattcatcgagatatcttccacaatttctgcatattgcatttcccggggaatttcgatgcgatagacgttagtgtaaatcgtatcacgttcgttttgcgttactgagaagttcacatcgcgaatttgaatctgatgttgttcaaaatagctctgaataaactccttggtttccaatttatgcttatacttaatttcgatttttttcaacgtattgatgtgaataatctttttcaagaagacaatcacgaaaatgacaaagaccgcactgatcaccgcaatttgatagtagcccatcccaattgcaagtcctaatcccgcagtagcccaaagtgaggccgccgtcgtcaatccttgaatcttgtggcgggtgacaataatcgttccagctcctaaaaaaccaatcccactgacaacttgtgcaatcagccgcgcttgatcagaacgaatagtggtactaatcgcactatgcgctaatgcaaattgaacgttttgcgctgcgatttcctgctgaatcatcgcaatcacacacgcaccaatgcagaccagaatgtgtgtccgcattccggctggacggttcttatattcccgatcagatccgataatcccagcaattaaggttgccagtagcagtcgaataatgatatgcacactcgttacttcaaacaataaaatccctccaaaataataccttatctctagtctagcataccgaacaaaaaaagcgctcgtcaatccatatcaatttacggattaacgagcacctattcattagccaactaggccgattgtttgtagaatcaaatagatatttaaaagcgtcaacacaattgtgacaaaccatgccgtatatttcacccaagggcggttaacgaatgggcccatgattttttcatcactcgtaaacattgtcaatggaatcatcgagactggcaatgcaacactcaagaagacttgtgagtaaatcaagaggttttcaacttgtgcttcgttcccatggtagtaaaccgtgaaaataataacaggtaagattgataacccacgggtaatcacccgtcgtgcccacaatggaatcttcatgcgaacgaaaccttccatgacgatttgtcctgaaagtgtccctgtgatggttgaattttgaccagaagctaataaagcaacggcaaagagtaaactcaacattgggctagcaatgctcccaacaatttctttgttttgtaaagcattgaataagtcaacgaatcgtcctaaatcactgttagttccaaagaacattgctgcccctaaaactaagagtaaacagttaacgataaatgcgactgataattgaatgtttgaatcaatgactgtaaacttgattgctttcttcttttcggcgtaatcgtcacggtcatattgacgtgcttgtgcgattgacgaatgcaagtagagattatgcggcataacagttgccccgacaatccctaatgccaagaatagcatcttctggttggtaacaatccgtgtacttggtacaaatccgcgcattacgtcgcccatatttggttgcgctagaatcacttcgtataagaaaacgaataaaataacggccaccaaggttgcgacaatcgcttcgatcttccggaaaccaagtttcattaatagtaataatagcaagacgtcaaatgcggtaattaagacaccccagagcaatgggatgttgaaaatcagttctaacgcaattgcggaaccaataatttcggcgatgtcggtcgccataattgctaattcggtgacaatccagaggaaaatccccatctttttaccggttttggcccgcgtcatctgcgctaaatccattccggtcacaattcctaaacgcgctgccattgcttgtaataacatcgcaattaagtttgatactaggatcacactgatcaaggtgtatgcgtattgcgcaccaccggcgattgacgtgatccagttccctggatccatataaccaacggccactaacgcaccaggtcccataaaggccatcaacgtccgccaaaaaccagcgttcttgggaatcgcaaccgtgttattaatttcttcaagactcgtgccatcagcatagtgtatgaatttctcatgcttttgttgattaagttcacccttttgtgaatcttctcgctgcttcttatccatataagtacctctttctcttcgattgagtcgttcaactattaggattcaatgactttgattttaggatgacctaactctgatcgtctccagtgttcaaattaatccttacccattctatcatatctctttgatgttgtccctgaacaagattaaaaaaaagctgtttctcagcgtttttttaagtaaccgattacaaataattgcccaccttaagtgctattaaaaatgacgttgactgtctttaacagccaacgtcatttaacttttatttagacgactaaacttaatagtaaaacgccaattaacccaacaatcgaaatcaatgtttccaaaactgtccaagttgcaagggtttctttgacacttaaatcaaagtattccttgaacatccagaacccggcatcattcacgtgggaagccgctaaactgccggctccaattgaaaggaccatcagtgcagggttcacaccggctgattgcattagtggtaagaccaagcctgccgccgtcaatgacgcaacagttgctgaacccaatgccacccgtaagacaactgcgattaaccaacctaataatagtggtgataaattggcatttgcgaataatttagtgacactatcgccaaccccaccgtcgatgaggatttgtttaaacgcaccacccccaccaatgactaggagtgacatcgcgattgatttaacggcttcttcaatcgtcttcataatcgctagggttttaatccgacgcgcccaacccatcgtatacatcgcaaccatcaatgaaatggtcattgcaatggctggtgtcccgataaaaccgacgattgaatccagcatcgttggatttttaggtaatttcccgccgttaaaggccatttgataaatcgtggtgacagccatcaaaatgactgggaataatgaggttatgacactaattccaaaccccggtgtttcgtctaatttaaaggttttctgaggcccaagtgccgtcagattaccttggcgcgcgaacgcatctggtactaagcgttttgcaatcctagtgaataatggaccggcaataatcactgaagggatcgcaattaagaccccatataacaatacgtgaccagcatttgcccctaaagctgaggtaattgctgttggtgctggatggggtggcaagaacccatgtgtgacagaaagtgctgcagccatcggaattccaaggtacaaaattgacacacttacttcgattgcaatcgcgaaaacgattggtactaacaagaccatcccaacttcaaagaataaggcaatcccaatgatgaacgaagccaacataattgcaatttgaagtcttttttaccgaacatatcgattaaggtatgcgcgattctaaacgcgccaccagcgtcggcaactaaccgccccatcatggcaccaaagccaaagacaattgagagctcaccaagttgaccgccaatcccgttttgaacactggttgcaatgtccgttaatggcatacctaggccaaccccaacggccattgccgttataactaaagcgataaacgtattgatcttaaatcgaataataagggcgagtaataagataatgcccaataataggactactaatgccataattttccctattttcaataatgtttgcgctatcatgatattgttaaaagtaactgggctttcagacccagttcacttcgttactctttaacttgcatatgtttgcgttggaagtcagcaattgcgccgtattccgtatttaattcccgtgttaatcgaatccagattggtaatagttcgcgataaacttcaaagttggcttcttctggatgatgcacattcgtcacaccaaccatttctttgacagctgatagatcatccactaagcctaaactatacatccctaagacagcagcacctaaacatgagctttcgaaactctctggaatcgtgacgtcttgttcaaagacatccgccaacatttggcgccataattctgaacgggagaagccacccgttgcctgaatactctttggtttacctgccacaccttcaatcatcagcatcaccatgtataagttataaacgatgccttcaagcgctgcacgcaccatgtgcgcccgcgtatgttgccgcgtcaaaccgaagtatgatccacgtgcatctgcatcccagattggtgcccgttcgccacccaagtaaggatggaataagagtccatctgaaccagccggaatttctgccgcaatttgtgtcaaaatatcgtatgttgaaacatgcatttgttcagccttgattttttcaggtgcaaaaagttgatcgcgcacccaacggaagacaattcccccgttattgactggtccaccgaccacccatttatccttggttaaggcgtaacagaataatttaccgtttggatcaaccactggatgatcaacaaccactcgcacggcaccgcttgtcccgatagtaacggcgactacgcctggatcaattgcatttaccccaaggtttgataaaaccccatcgctggcgccaaagataaatggtacttcagcaccaatgccggttaattcaccatagatcggatcaatccctttaacataatccgttggttcgactaattcaggtagttgttggcgtgtgacaccagccacttcaagggcttgttgatcccaatctaaattaaaaatgttgaacaagccggttgctgaagcgattgaataatccatttgatacgtatggaaaagtttttggaagacatacgttttaatatcgatgaattgactagcttggttgaacaattcaggttgcgcttctttcagccaaatcagttttgaaagtggcgccatcggatggattggtgtgccagtgtgttgataaatggcttggcccaacccattttctttcaattgttgacttgctttagcagctctattatccgcccaagtaattgcccgagttagcggttgatcatttgcatccatcagaatcaagctgtgcatcgcagccgagaaactaacgccctgtaattcgccggcttgaacgttgcccttgcgcatcacctgtcgtaatacttctgacactgcattaaaaatttcatccggatcttcttctgccatatcgggtacggtttgatataaaggataaccaacgtttgcgtaagctttaacattcccttttaaatcatataaaaccgctttcgtacttgttgttccaatatccgaaccaatcatatatttcatcataattacctcgtttatgtggtgtttactgactacttactaggataccacttatttcttatcaactgcatggccgccgaattcatttcgtaaagcagcgacaactttaccagtgaatgtatcatcttcaagtgaacgataccgcatcatcaatgataaaccaatgaccggtgttgggacttgtaatttcaaggcttcatctaatgtccattttccttcacctgatgagtgcatgataccttttaagccttctaagttagggtcttttgcaaaagcagattccgctaattccatcaaccagccgcgaatcacagaaccattactccaaaccttagcaaccgcttcgttatcatattcaaactcaccatgtgataacacatcgaatccttcagcgatagattgcatcatgccgtattcaattccattatgcaccattttgagataatgaccactaccagccttcccggtatagagatagccatctttttgagcaatatctttaaaaatcggttcaatctgtttgaagacttccgcgctgtcaccgccgatcatgaagtttccgtctgcgttagcaccgctcatcccaccagaagttccgacatcgaagaaatgaatcccttttgcggcaagcaatgcattgtgttgtttagaatcttcgaaaaatgaattaccaccatcaatgacaatgtcaccggctgtcaatttggtacttaacgtttcgattgtggcttgtgttggcttaccagcaggtaacatgctccacacaattttaggttgtggcaattgtgccaccacatcatcaatatcctttgcaggtaatgcacctaagcgggttgcttcttgaaccgctgcttcatttaagtcaaaggcgacaacctcgtgcccattacgtcgtaagttagcgaccaagttaatccccattttgcctaaaccaatcattgctaatttcatctttgctagtccccttatccacaatttcatgtcacttttattaatgtcttcattatatgtaaattattttctttaatcaaccctttttgagaaaataattttcttagttgctttttatgctatactatcgataacaagggggcacttcaatgacacaaaacatcgattccttactccgtgcgtactacacgaatttaagtgaaaaatacaaacaaatcgcagattacatcttaaaaactgaacatttcaatcaaagtttaacgattcaagaatttgcggctgactgtggtgtttcaacggccactatttcccgtttcgccaaaatgttgaccttcgcaaacttccaggcactcaaaatggcgttacttgctaaacaagcaatcccaacagataatccactcttccatgaaattagtaataatgatgactatctgaccatggccgataaaattttcgcatccaatactaatgcgctcaaagcaactcgttcactactgactgaagcgcaattacggcaagccgttgattatatcaaccaggccaagcgcttaagtttatttggcttgggcgcttctggaatcgtcgctcaagatggctaccacaaatttttacgaactgcgattccaactgtttacagccaagactaccatctacaattgatgcaggccacccaactcaccgaacaagactgtgcgctgattatttcacatagtggtcaaaataaagatgctttagaaattgcacgcatcttaaaagaacgtcacgttccactgattgtcatcaccagttttggcaattcaaccctcgctaaattgggtgatgtgacactgttgtccatttccgaagaaaccaattaccgcgccgaagcactacacgcgttaattgcacaaatcagcatcgtcgatagtctgtttatgatggtcgccgttaataatggcccacaaacagaacaaagtttcaaagccattcggactgaaattgatcggactagacaaaaataaaaaagctgaggttgaagaaatacttcaacctcagcttttttgctgttctattttgaacgtttaaacgtgctttctcgaactgacttttccagttaactaaaaaattggtagtcatcctgaattctggataactaccaattttttattaatgctcagttgctgaacgcaaccaaacgcactctattcttaaacgtgcttttttaaacgcactctatttaatttctgctaatgtcttttcaaggtgggctaggacacggtctttacctaacaattcgattgaatcaggtaatgatggaccatgcatttcgcgggtcgttgcaatccgaattggcatgtacaattgacggcctttaatcttcgtatctttttggatgcctttaatgatttgcataatccgtggtgctgtgaataatgttaaatctttcaagcgttcgctgaattccttcaaaacaacgggtgctgtttcgttatttaattcttcaagcgcttcggcgtctaattgttcaggttcttcaaagaagacatctgacatttcaacgatttgagctgtgtagctcatttgatcttggtataacgcaatcaaatgacgggcccattcgatcgttttgctatcaggattttcagcgattttacccgctttaatcaagctttctaacgaaagatccatgattttgtttggatctgattgtttaacgtattggttattcacccattcgagtttcttttgatcgaaactagctggtgatttgctcaaacgttttggatcaaattgtttgatgaattcttggcgattgaacaattcgctttcgccaactggtgaccaacctaatagggcgataaagttaaacatcgcttctggtaagtaacccaattcgcggtattgttcgataaattgaagcactgattcatcacgtttacttaacttcttacctgtttcagtattgatgatcaatgtcatgtgtccaaagactggtggttcccaaccaaaggcttcgtagacagccaattgttttggcgtgttggcgatatgatcgtccccacgcaagacatgggtgatttccatcaagtgatcatcaacgacaacggcaaagttatatgttggcatcccatcgcgtttcatgatgacaaagtcgccacctaaacgatctgattcaaagctgatttcacctttaacaatgtcatcaaacttgtaaacgtgatccttaggaagacgtaaacgaacaactggttgtaagccttttgctttagcagcttcttggctagccttaatttcatcatcactcataccttcgtattcgtagatgtaacgtggtgcttcgccagctgctttttgggcttcccgttcttcagttaattcatcttctgttttgtatgattcgtaagctaatcccttagccactaactcttcaattaaaggcgtgtaaatttcgcgacgttctgattgacgataaggaccaaagtcaccaggcttatctggaccttcatcccaatccatacctagccacttcaaattatctaactgactgttttcaccgtcagcaatgtttcttttcgtgtcggtatcttcaatccgaatcacgaaagtccctttgttgtgacgtgcaaataaatagttaaataatgctgtacgagcattcccgatgtgcaaatgacctgttggacttggcgcataccgcactcggattttattttttgccataaaaaaaacgcctctttctaaaattatacttgtctactagtttaccgttattatgcctaaaaataaaggctcagagaccactaatccacaaaaaaagaatctaggacaaaagtatgtttgtcccagacccttcttctgatagtagaattctatcatttaaacgtgctttttgaaccatcttcctgcgcttaaccaaatttgccaaatcgacgattacatcgtcaattcgtcaaatccagttaatgctcagaagataaccagttcaaacgcactcttccacttaaacgtgcttacactaactgctttctgcgccttgctacatcagtcacatcaccggctttaccggcaatccgcctgattaggcaaatgcttaaaagcaaaccgttagtgacgcactctcaccgcattaacggagtggtgtccattgccattcttcaacttctggtaaatcagtaccttcattgcgaatgtattgattgtgtttagcaaccatgtcatccattgattgtgcgaattgaccagcttgatcgccaagtacgtcaactgcaacttctttagatagactgaaacgatccatttgattcaagacacgcatgtcgaatggtgttgtaatatcaccattttcacggtagccatgaacatgaaggttatggttgtgacggtcaaagaagatatcacgtactaagccttcgaaaccatggaatgcgaagaccactggtttgtcttttgtaaagtacatgtcgaattcttcatctgttaaaccacgagggtccactttaggtgaacgaagtttcaataaatcaacaacgttaatgaaacgaatcttcatgtcaggatattgtttgtgcaagattgagattgcagccaaactttcaagtgttggttctgtcccagcagctgcaatcacaacatctggttcagcatcttggtctgtacttgcccagtcaataatcttcaaaccattcttaactaagactgttgcttcgtcaattgagaaccattgttgacgtgggtgttttgaagcaaccactaaattgatcttttcttggctcttgaagacagtatccattgttgctaacaacgtgttagcatcagcaggtaagtattcacgaatgaatttaggtttcttttcagctaagtgtgttaagatacctggatcttgatgtgtgtaaccattgtgatcttgttggaaaacagttgatgtggcaatcacgttcaatgaaggatacttgttacgccatgcttgttcatcagccttacgtaaccacttgaagtgttgtgttaacattgaatccacaacgcgcaagaatgattcgtaacttgcaaagaaaccatgacgaccagttaggacataaccttctaaccaaccttcagcttgatgttctgataattgtgaatcaagaacacggccttctgttgccatgtattgatcgtttggttctttgattgattccatccattgacggtttgttgcttcaaaaatatggttcaaacggtttgacattgtttcatcagggccgaagattctgaagtttttattttgatcgttgtctttgatgatatcacgaacatattcgcctaaaacaatcatgtcttgcgcaacgactttaccgtgttctgaattatccacagcataatcacggtaatctggtaagcgtaatggtttaggatcaatcccaccattggtgattgggttagcagccatccgttgatcgcctttaggtgcaatttctgcgatttcaggttttaattgacctgcttctgtaaacaattcttctggacggtatgatttcatccaatctactaatgcatcaacatgttgcatgtcagcactgtcaattggcactggaatttggtgcgcacggaatgaattttcgattggtacgccatcccatgtcttaggaccagtccaacccttaggtgcgcggaagacgatcattggccatactggacgagatgaatcgccgttttcacgcgcattcttttgaattgcttggattttttcgatggcttcatccattgcagcagcagttgctgggtgcatcttttcagggtcgtcgccttcaacaaagattggttcccaaccattgccttcgaagtatttcgttaattcttcatcactcttgcgtgaaagaattgttgggttagaaatcttgaaaccgtttaagttcaagattggtaagacagcaccatcattcttaggattgatgaatgtgcttgataaccatgatgcagctaatgggccagtttcagcttccccatcacccacaacaacagcagcaatcacgtctgggttatctaaaatcgcaccaacaccgtgtgataatgaataaccaagttcgccaccttcatggattgaaccaggtgtttcaggagccgcatgagaagcaacgccgcctgggaatgagaattgtttgaataatttcttcatcccttcaacatcttgagaaatttctggatagatttctgaatagctaccatctaaatatgagtttgagaccatcacttgaccaccgtgacctgggccttcaacgtagaacatgtttaagttatatttattaattgcgcggtttaaatgagcatataggaagttttggcctgagattgtcccccagtgaccaattggttttgccttaacatcttttgcttccaaaggacgtttcaatagtgggttatcttttaagtataattgaccaactgagatataatttgcagcccgccaaaatgcgtcaactttagcaaggtattctttgcttgaataatctgtcattttaatagcacccctttttaattttaaaaaagttcctaatagctttactttaagttccagtcgcagcttttgcaactttgttgtttctgactactctcttatcatactaaactttttaaaaaagtcaaccatttttaatattgggtcgtaccaattttttaaatctaaaaatagcggccctattcgcgaccgctaaccgtaacgaatgtattatatttcatgtattggtagtgcaggcgcatcgttgaaaattcaaacggtgtcccatcgtctaagaagaaaatcccttccatgatgccaactggttccgtcggtttcaactttaagtgtgcttgatcatcatcagttgatggttccgcgaaaattgacaggaaagcgcgtgtgacttcttgatttttctcggtttccaagtagttaaagattgaactcgacacaattttttcggtcaattcgggcattaccttaatcggaatgaagcccgtttcaatcatgaatggttcatcatcaaacaaccggagacgcttgatttcgtaaacaaaatcatctggtttcaggaacaagtctcgttgcaattccgcgctcggcttgatgacttggaaatctaataatttaatccccggtgtccgattaccggctttaaaactgtcggtaacccctaggttagagccattgtaattaaaaaacgagccaccctttaaataaagtggattaataaaggttcctgaaccccgttttttgaaaatgatcccttgattagacataacgtttaacgcacgtttgaccgagctacgactcacttgatagtgttcagtcaacgtccgttcatcgggtaatttcatgctgggaaatgattctgcgttgatcgctttttttaagtccgcgataatattctgataaactaagtcggccatgctaaactcctttataaatcattttatctcaagcttattatacatgattcctaaaagtcgtctacaaacagactcgataaatgttcaattattaatgcaggccaataaaaaaagaggtgctgagacaatgtttattgcctcagcacctcgcgcgctccggatcagactatcttgcaaaaaatgcctcacagcgcctactttttatttaatgtgcttgaaattgggtatagtattctgctagtaattgggcaatccggttcccagtaatggcataattttcagcgggttggttagctaatgaaatccgcaagtagccatcatcagtccccattcctgccccatccatcacaacaacgccgtatttagctgcaagtttatcttcgaaatcaagatagctcacgtgcttttcgaaatagtcgtggaattcatgcccatactttctttcagcaaaatcatagatgttaaataccgcataatattcagcgttttctttagagtgatcacattccatgcccatcgattcccaaaaagcgttgtatcgcgcatcaaccattttcttggaagcttcgatgtatggatccttttcaccttcgtgaattaagctggtcaaactaaatagtgccatcaaaatttgttgtggtgttgataatcccgcggtgtggtacaacgcgatttcacgactgtcagccactgttcgatcaatgaatttcatcgcaagcggattaggcgccacaactgagtaccgtttttcaaaagctgccttaatcgctggttcttcagccgttcgcttagcaataatttcatcaaaaacattatcttggtgcactgctagtaagcctaaacgatgcccagttgccccataaagttttgaatacgaataaactaacatcgtatttcggggggcaattgagtaaattgtttggaaatcattcacaaaagtcccataaacatcatccgtaatgatgataatttctgggtttgcttcaacgacctctttaatcttagctaacgcgtgtttgctgaaagcccgcgaagtggggttcgttggattaaccacaaaaaaggctttgattgtcgggtccttcaattcttcaaacttggcgtccatcatttgccagttgtcatcttcaacggaactcacatcgaattgctttaatttatattcacttaattctgggatttgcaaataaggggtaaagattggggtattgatggcaatcgtgtcgccaggccgtaagatatggctgatcttcaattccttgaacaaataaaccattgcggctgttccgccctctgttgggaagacatccgtttgattagctaatttttcaccattatatagtgacacttcaaggtatttatttaggattttttccacattgattaaacttctcgaaggtactggatagtgattgccaatcgcaccgtcgacaaattcgtgaaccaaatcatcctgattgaggcccatgtgcttttcggtataatctaaaaaggctaatataaatcgatctgttttatgactggcatcaaggtaggcatgcagccgttgtgcaatccctgctttatcaacgtagcccgccatatctccatcagcctcgttaattttcttagcagattcttcgacgccaaattcgacaagcttattaaaagctaatcgcgcccgcgtattaatccagttagggtccccacgaccaacattaattggcgcattatgcattgtatttttttctgaattttctaagaacaaagcggcaacttcaaagtttgacatctcttttaatcgctcaatatctaatgagtgcatcgtttttccacctttttcaattacttgctacattcataatcgcatctaaaagcactttaacgctaattgacagtcaaaataacggctagcattgtaaatttattgtttgatttattatatcgtttttgtctcaaaaataaagcactcattcaaaaatcaaaccataaatgccacagcgattctccaacttcatattgcatcatttaccacaaacctgcaaccctgcggcgggattttttctaatgctgctaaaaaagcacatcatcgttcaacgatgatgtgctttttaaagttttaagcgacgttattccttattttctttgaagaacttcgcgaaatttttgcggtaattgtgcaacatccatttaatcaatagccagcgtttgagattcatatctttgctatattcaaaagtggtgccgtaacgtttttgtttgatgagtgccaatgccttgtctttttcggcattattgcgggcatatttcttaaagacatccactgaaacgcccaaccaaagtgcgggactgtcttcatctttattcgcccaaacaacaggttcatcttgcaagtcgtttgtcacgtaatcgcgcaccacccattgggctaagttatagccgttcaaggtaacaaagaaactactgcggcccatccgtaaattgatgtcgaataacttgtaggtgttatcgcgttcatcatatttcatatcgaggttggcataacccgtaaactcgatatcttcaaggaatttttggacttgttgataaatttgtgcgttgtattccggcaaaatcgccacgtaattcccaatagctgcgggtgctggatcttccaataatggatggcccagacacatcatcttcacgtgatgttgttggtcaacatagatgttcatcacgtgcatccgactgtcatccccaggaatgaagtcttgtaaaatcatgtctgattggtagccattttcatatacttttcgcatgatgtcttggaattcagcttcacttttaatcgtgaaagcttttttgcgcccttcaaaatgcacatcaagccattccacagaatccgccggttttaacgccactggatattggaaaggttgttccacctgattatcttcaaccatttgcttggtaatgatgtgcgtcttgggataaggtaagtcatatttgtcacagatttcatagaaggtttccttataagtcaacttttctagtaaatcgtgatcaatatatggacaaacaaagacatcttccaattccgctttatgttgtgaaattaagctcgcatagccatcaccacagccaatcaaaatgactgggccatcgctatcgcgatagatttcctttaattttagcatttcagtaatgaatccagggtcttcactgaagcctggaatcaattctaaatcgacgatttttgtaaaccgagttggtgctaattcctgacttgcgtaggccttaacaggttcatgatacatctcataaaacgaacgggccatcccgtaaacgttaaaatcgctccccaataaaatgggggtgaagtttttaccgtttgcttgcatgctgtcaccttctatatcaatatttatcgtagtataccagactgccgttcaatatacgtcagctcaggatgctctttgttaaaacttaattagtaattgctacttgttgtatagcccgtcgacaatattttggccgaccactgtcatcggatcaatcactttgtcgggatacaatggaaattccgactgtgcaacactcaattcggtacagcccaaaataaccgcgtcacaatcatagtcatttaacattgtatcgacaattttttgatacttgtcctggctgaatgtcccagtcgccttaatgtcatcataaatcaaactcatcgtggcatcttgcaatgtttggtcgggaacaacactttcaagaccaaaagcagcaattgctttttgatagataccggcttgtcgggttccggttgtgctgagaacaccgattttcttcaagccgggaattgtttgttgcatgtgtttgaccgtttcccgtggcatgtggataatgtcgaaatctgcggcagcttgtaattcgtcgtagaagtaatgggctgtgttacaggtcattaccatgaacttcggcgctaacaaattcatttggcgaatatcttttaacatcacgggcaacggattttcttggctgttgtcgaggatgtaggctgtgcgatctggaatttcagcgtggttgaacacgacgtaattcagataatcttgatccttcttagccggtgttaattcatcgattagatgtacgaaagtttcggttgccgccgtccccatgccgcctaaaatcgtaaacatttcttccatggcaattctcctttacttaattgacttcatttgatgctggttagtccttcttttgaggcctcacttcgatacctaattcttctaattgttccggtgtcacttcactaggcgcattggtcattggttctgtggcccgggaatttttagggaaggcaatcacgtcacgaatattgtcgcgaccagcgagcaacattgcgaaacgatccaaaccaattgctaagccgcctgatggtgggaaaccgaatttcatggcatttaataagtggccgaaacgttcttgagccacttcaggggcaacccctaaaacagataacattttttcttggacttctggatcaaaaatacggagtgaaccgccacctaattcataaccattcaagatgatatcgtatgaaattgcatgtgccttatgtggatcagtatccaacaatggaatatcttcatcacgtggacgcgtgaatggatggtgggctgcaatccatttgccaaagccttcatcatattcaaataatggccaatcaacaacccatgtaaatgcaaattggctcttatcaatcatatccatttctttagcgaagtgtgttcgtaagtaacctaagctatcacaaaccacgtggaagttaccggcaacgattaaaattaaatcatcatccattaagttcaaacgttcaacaagcgcttcttggtaaggtaataagcctttagcagaagcccctgataatttatcaccagcgtatttcgcccacaacaatgacttagcgccgtaacgttcaatgtattgttgttgttcgtctaacgctttccgtgaatatttaggggcggcattattaacgacgattgcgcgcacatattggcccgcttcaacagcttcagagaatggcttgaagtcagaatcttgcacgatttctgtaatatcttgaatttgcatatcaaaacgaacatccggtttatctgaaccatacttgtccattgcatcttgccatttcaaacgtgggaatggtgtttgcacatcgatgcccttgacgtctttcataacttttttcaataaaccttctgtttcggtttgaatttcaacgtctgataagaacgttgtttcaacatcgatttgtgtaaattctggttggcgatccccacgtaaatcttcgtctctaaaacaacgggcaatttgatagtacttatcaaagccggctgacatcaataattgtttgaagagttgtggtgattgcggtaatgcatagaaactacctggataaacccgtgaaggcaccaaataatcgcgtgcgccttcaggtgttgaactcgtcaagttcggtgtttcgatatttaaataaccattgttatcataatagctgtgaactgcacgagtaatcgcagcccgtgttttaatggcattttgcatttctggtcttctaagatccaaataacgatacttcaatttcaaatcttcagaagccgtattgttatctgaaatttcaaatgggagggtttcagctttgttcaagaccactaagtctttaacaatcacttcgattttccccgtcttcatgtctggattaatggccgcttcatcacgcgccatcactgttccttggacttcaacgacatattcactctttaatttacttgctacttggaaaatatctgcatctgtgtcttgattaaacaccaattgaacgatgccttcgcgatctcttaaatcaacgaaaattaagttcccaaaattccgttggctttgaacccaaccatgtaatacgacttcttggttgagaaattcttccccaactaatccacaatatgttgttcttgttctcatatttgccaatcctctctgaatctacattttataaaaaataaaaaaagcaccctcgtctttcgacaagggtgctttgcgcacggtaccacctttaatttcagctgttgataacgctatctgctagcgggatattcatccaagcctcaaaagctgtcaactgaaatcaataagtaactttcaacggggttactctctctgtgattgatcgctaaaaccaagtactttatcgatggctacattttattataatgtccaaaatatatcacaaagccctttaaccgtcaagttttgcagttggattgagctagctggattcgaactagcgtatgacaggatcaaaacctgttgccttaccgcttggccatagcccaataatgcggcaccaagattaagttggcgccgtaaattgattgaattgaaacgtgctttcattaactgctttctgcgttttgctacgtattgcaaacaatcagctgcgctgattattcacaacactaggcaaatgctcaaaaacaacccgttaatgacacaatctaaacgtgcttttgatgacaacaatttccgcttaatctaaaattcccaataatcctaaaaacccggattattgggaattttgtattaatgctcagttgttaaccgtcatcaaacgcactctaaacgtgctttgacagccatcttcttccggttagctacatcagtcaaatcaccgactttgtcggtaatccgcctgattaggctaatcctcagaagataaccgactgcctgcgcactctttaaattaccatacaaatagtccgactgttgctgctgaaagaagtgatactaagattcctgatagcaacatgtagccgacgtttttggcaatcatgtcgttcttttcacggtccacaaggcctttgaaggcgccgatgatcatgccgactgttgagaagttggcaaatgatgtcacgaagaccgttaagacagcttggtaatgtggtgcgaagctcccgattgaatgttgaactttacccatgacaacgaattcgttggtcaccaacttcgtccccatgaattgtgcaaattcaaaagcgtggtgcacatcaagtcccattaaccatgcgaatgggaacatcacgattccaagtaaatgttcaagggtaatccaagggttcactaattgaagcaccttgtcgatcaaggcagccaacgcaacaaaggcgatgacgtttgccgtgataattagaactaatttaccagcatttaagattgaatcacctaagaatgagaagaatggttcacgttccactttgccttcaaccatttcggttgcttcaacagctgcggaaccactcccacccattttagcaatcgtatcttcttcgggtgtgactttcactgggtttaaaatattggtgacaataatagcgttaataatgttgaccggaatcgccgttaaaataaattggcccggcatcatttgtgtatatgcgccgatgatggaagctgtcacacagctcattgacatcatcgcaagtgttaatgttcgttctgctttcatttgtttcaattgtaagcttgaaacagctaatgcttcggtattacctaaaaacatcatttcaactgcaaagaatgattcaaactttggttgtcccgtaatcttagctaacccacggcctaaccatttaatcacccaaggcaagaccccgatatacgttaagatatcgaataatgggataatcatcaagattggtaataacacgctagcaacgaaatccatttgtttcacattgacccaacttggtagtgcaaaagcaatcccagtataggcaacttgcactaaccagttaaagccgtttgctgcacctaaaacaatatcccgcccgattgaaaaactcgttaaaaaccaagcaagcactaagttaatcactaacatgattaagacggagcgccaatcgatttctttctttttctttgagaacagaaagccgactccaataaaaatcagtaatccaacaacatttacaagcaaatacacgacacgccacatccttcatttgtctttttcgtaccgctttaaataataccgttcccccttgtaaatgtaaactattgttcaccccctaattgcataaataatcacttgttaaacgcaactaatttagtccacaaaaaaagcggtccccttttgcaaaggaccgcttttccattcatttttaatagcccgcattccactgatttgtagactgttgcatttgccaagtattggtggtgttactgtaatcgttgttaccactataagttgcactgttcgagtagccatagttactttgcgtcgtcgttgcagcactcttttcaccattcatgacactttcagaataaaccgtaaactcttgatgattttcttcacctgtaaagttggtattcaaatcgttttgtttggtttctgcgttgttaatcgttgttttctctaatcccagtgacgttctcaagacatctgaaacgcgttggatttcttcattggttggaatctgatacgaactaccatcaatatcagcattacgtccagttaaaacatcagactcaattgatttagctgcctttcgataattttcttgaatcgctaccatgtcatcaaaactgaggttagtggcaacactatctgacaaggagtctaagatagattcaaagttggtcaaagatttaagcgagactgcagaattaatcatcgacgtgataacttgtttttgccgtttttgacggccataatcgccttctggatcatcgtaacgcattcgtgagtagtctaaagcggcttttcctttcagatgcatcttgcccttagtaaactcgctcccgttccattcgaacgtaaatggtacgtcaacatcaacgccaccgacagcgtcaacaatcttcgataagccccccatgttaaccgtgacatagtaatcaattgggacatcgaacatcttttcaaccgtcgacattgccatatcagagccaccaacattataggcagcattgattttttgcatgtcgaacttctctgcgccttgtaattgcgctagcgtatcccgaggaatgctgaccaacttgacctgctctttatctggattgactgtcgccacaatcattgtatcggaatttcctttatcaactcggccctcagcaccagtatccactccgagtaataaaatagagaatggttttttatgtttaatcgttttagcggcttttttagtcgcatttggtttataaattttattcgctgcagacttcacttgattactgatgcgtaatgcatacgcgccgccaccgaagaggactagcgttagaatgagtatcaaaactttcatcgtgcgatgctttttaacttttttgtagtttgcttctcgagatccgaaaaatttagaattctgcataggtgtttcccttctattatgtatcataccggcattaataatgttatgttgctattatagcggaattatcatttcaaacaacgccttttaagaaaagttacacaattttaataattccttcaattgttgaacaacactttcctaagcgcttttatgctaaaatataaacaattagtcttaattatggagggttcatatgtcaactcaacaactccccacccgcaatgctgttccagaaaagctcacatgggacttaaccacgattttcaaaaatgatgcagcttttgaagtagcctttaagaaagttaaaacgcaattacccacactcaaaacacttgatcgtccgtttgaatcggctgatcaattagtcgctacaatcgaacaaatcttagccactttccgccagctcgaaacaatttacgtttatgctagcatgaaaaatgatcaggatactgctaacgcaacttatcaaggctatcaagcccaagtggacagcttagcggccgaagtttcagcagcagcggcctttttagagcctgcgattcttgctattccggctgggcaattagcagattggcttaccaagacgcctaatttagcagtttacagccatttcattcaaaccattaccgatagtcgagaccatgtcttatctgggcaagaagaagccttgttagctgctgccggagatatcttcagtgctgctagtcaaaccttcagcgtcttagacaactcggatttacaattcccagaagtgactgacgaaaacggacaaacgtttcagctttcagacggggtctacagccaacttttgcaatcagccaaccgatcagtccgccaagcagccttcgaagcactttacaaaacttatggtcaattcaaaaatacatttgcgacgacgcttgccactgaaatcaaaggtcataattacttagctcaagtccatcactacgatagtgcacgccaagcagcgctagcacccaaagcaattccagaagccgtctatacaaccttggttgatcaagtgaaccaacacttaccacttttacatcgctatactgaattacgcaaaaagcaacttaatttatctgaattacacatgtttgatctctacacaccacttttaggaaaacccgcattaacctacacttatgagcaggcgcaagcaactgccaaagaagcattgtcgatcctaggacccgattacgccaaacaagttgcccatatttttgatgaccgcttaatcgatgtttgtgaaaaccaagggaaacggagtggcgcctattctggcggcgcttatgacaccaatcccttcattttattaaactggcaagatgatttaaacaacttatacacattggtccatgaaacggggcatagtgtccacagcgccttcacccgtcagacccaagattatgtttatggcgactatccaattttcgtggccgaaattgcgtcaacaaccaatgaaaatctcttaacggaatatttattgcaaacacagtctgatcctaaggtccaggcctatctattgaactactatttggatggttttaaaggcactgttttccgtcaaacgcaattcgctgagttcgaacatgcgatgcatgctgccgctgccaatggtcagccactaactgccgagttcatgtcacaacaatatgcggacattaatagccgctactacggacctgccgtcgttaacgatccacagattgcccttgaatggactcggattccacatttctacatgaactattatgtttaccaatacgcaaccggctttgctgctgcaacgactctcgctaacggtattagcaccaaacagcccggtgctctcaatcactatttagactacctaaaagctgggagctccgcctacccaattgaaattatgcaacaagccggcgtcgatatgacgagtgccgactatctcgaacgcgcttttgcagttttcgaagaacgcctggatcaactcgaagccctactcgctaacctaaattaagcctcatgaaaaaacgtcctcaatgattgaggacgtttttttaacggctaattcgtcgatgatataacaatgcaataaagtaaaagccaaactcaatcgtggcgatgaagaaggtcactggccagttcgttagataaccaagccataaaccgagccaaacccctaataacgctgcggcaaccgagattgccaacatcccgggtacgctcttcgctaaatatttagcaatgaacgccggaatcgtaactaagatgaatactagtaatgaccccacaatctgagcagcaatgctgacactgacggctaataaaattaagaaataaatcgatagtaagttggtctttaaaccttgtgcttgagcgccaatcggatcatatgaatcaaataccaagtaccggtaaaagatcaacagcccaatcataattgccccagataagatgattaattgataaacatctgctaagctaatgccaataatcgaaccaaataaaatattggtagcataactagcatttcggtttgaaagggataaaaagagaatccccaaaccgacaaacagacttgaaatcgcactaatcgacgcttctcgccgtgattctttggcactcatctgaccaatcgtgattgaactgagtaacgtgaacaataacatcccattcaatggtgcaattcccatgaaaaccccaaatgaggctccggcaaatccaatttcagatagggtatgcgctagaaatgacatgttccgcgcaacaacaaataccccgattaaaccgcaggtaattgcgataaaagtactggcgacaaaggcatgccgcataaaatcaaaagttaacactcgcttatcctccgctttaatctaattccaaattgggatccaactgactcattggtccggcttcatattgacctcgttttaaaaataggtattgatccgtgtatttccgggccaattctaaatcgtgggtcacaaaaataaccgtcaaaccatgttcccggttcaactctgcaaccaaggccatcacttcttctttagtttcaatatccaaactcgctgtcgattcgtctaaaatcaacaagtctggtttactgattaatgcttgggctaaatacgctttttgcttttcaccaccagaagcattccccatggtcgtcttttgcaacgcggttagatgggtctgttctaaaatttgatcaagcgcttggcgttctttgcgcgatttccacggtaagtggctatcaagttgattcaaactcacaaaactacgaatggacaacggatattcagcttctaaatttctaaactgtggcacataaccgatgtttagcttttgcttatccgggttaaaaacgagttgtccttctgtcggttgtaaattaccgattaataggcgcaccaaagttgttttgccaaccccgtttggaccgattaaactcgtcatgctaccacgtttgatcgtaaaactgagatcttttagtacttgtcgattactaaaggcaagccctaaatgttgtgcattcactaattctgtcattttgaatcctgagcctttctaactgcatcaaattgctgttgcatccatgttaaatatgtttttttagcgggtagtgtttcagttacttgtacaactggcaccccttctttatccgctagttcgtgcatttgtttaataatgggactttcttcttgcttattaatcactaaaaaggcaatctgatgggttttaattaaatcccgcatcgttgtaatatcttttggtgatggatcggtcccatcttcaattgctttggcaaagtgttggttagcgactttgtaacccgtttcagccaatgcatagtcaaaaacgggttcactaacagccacttgttttcctttggcctgcgcctttagttgttggagttgtgcgtctaacgaagctaactttttaagatacgccgcaccattttgctgatacgttgccttatgtttcggatcgcgcttgctaaattcagtcactaaccgcttagtcaatgttggcatcgtctttaaatcataccataagtgttcgttagcgccattagattgtttcattaattgactgactgtcaacacagtttggtcatctggttgggcactcttgacgactttgtttaaccagctgtcgtaaccaagcccgttttgaatcacaacatccgctttagccacgagtttagcatcattggttgttgcttcgtatgaatgtggatctaaactgggactattgataatcgacgtcacgtgaccttgattacctaaaaccgcttgtgcggcctcaccataaaaatcgagtgacgatacaacttgaatcccactcgcctttttcgtactctgaccacaaccagccactaatagcattagcagtaagattcccgccatgatttccaaaccttttttacgcatctttttctcctcttttataaatcgtaattattacgttttactaaaaatattttacacgagtctcactaattgtcaatcatttttctgaaaacacttaaaaagggattgggacaaagattgcttttgccctaaccccttttttgaattattgaactttaaacgtgttctgtaagtcattctcctccggttaaccctgagtcgcaaacaattactacaattattcacgctctgtgttaatcctcggagcatcccgacttacgccacactctttaattaccagatttgttccactgcacctgttgcttggacaacaaaataacctgcccgtggttgatcttcgtttggtacgtaaatattaatgagatagccttgttgcccaccgcgtgtgattaagccattattcaaatacgatgcggtttgaccaaattgtgagccaacttgttgaaccaccaatttaatcgcttggttgccatctacggcagttgtttgttgtggtgtcgtggtagtcgttgttggtgcactgctgctagattggctcgcagattgactactgctacttgccgttgtagcagttgatgatgattcagcaacacttgcagttgatgaacttccttgtggggactctacttcagttgaagatgccagcgccgctttggagctcgcttttaattggcttgcactacttgaaagttcactttcgcgttttgcaacgctactttcacgtgctttaagactagccgtggttgaactttgcttggcatcagcatcttgatttgccgtactactttgaccacaagcccctaataatagtagtcctgataccaaaactgtactaactgtaaccatctttttcataataccccctccaactcctattgattcatctttattctacgagacccacctcagaatagcaattaaatccacatctgatttaaaaatctttaagaaacacgctgattagcttaacttagcagccacttgcttggcaatcaccatatcagttgggtatggtgtatcgaccccgcgtactttctgataagcatcggcccctttagccgctaagacaacaatttcgcccggtttactttccgtaatcacctgttcaatcgctgttgcacgatcaatttcgatggtggttgtcaccttatcctggtcaatccctgccaaaatttcagcggcaatggctgctggatcttcaaatcccggatcatcagtcgtcaaaatggcccgatctgcatattcattaaggacctgtgcaaacccagcacgtctagaaacacctttatcgccaggactaccgacaacaactagtaggcgtggttgattgtattccttttgcaagaagctcaagagcgccttcatgctggcataattatgcgcgtaatcaacatatacttgaccatgtcctggaacggctaaggtttccatccgtcctggaatctgcaagtcgcgaattccttgttgagctgcgattaaatccgcccctgccaaaccagcaccaatcactgcagctgtcgcgttgctttcattgaaatccccaattaaacgcagttggtaatcaccagaaacaccaagttgaatggctcgttcagaagccgcggtaactttaaaccgactttctgctaagcccgtttctagattttcaaagcggaaatcaaccgccaccggaattgtaggttgataatccgtttcggcaaataagtaaattgattccggagcagtcgtcgtagttgctgcagcatacacatccgcaaaatattgcgtttgcgcgttaatcacacagtgtcgtgagttgaccaataattgtaatttgcagtgtaagtaatcttcgaaattaggatgttcatttggtccgacgtgatcaggcgaaatgtttaggaagaagccaacatcgaacgttaagccgtacactcggtttttcttatacgcctgtgacgaaacttccatcactaagtgcgtcatcccgttttcaactgctttgcgcatgtcgcggaataaatccaaactttctggtgtcgttaaattcgatttgaagcgatcctctggtttaggccctaagacacgatcaattgttgaaaataatgctgttttttgacgggtcgccgcttgtaaaatcgattgagtaaagtaggccgcagttgtcttgcctttggtcccagtgtaagccacgataaataaatcatcttgtgggtaatcataaaaagccgctgataaaaccgccatcgctttttggacgttcgtgacgattaaggcgttcatcccgttgccttcaacaatcgcttgttcggcaacatatgttacggcccctaattcttttgcatttgttaaatagacgggacgaaaattccctttacagaaaaagagcgtgtcctcagttacctgccgtgaatcatacgcgattccggtcatatttaaagtcgggtcaccattaagcgccacacttttcaataaatgatgctcttttagaattaacgtacatgcatctaatgttaaagccattttcgtcctcctcaaaatccttgtgaatggttttaattatagcacgatttaatcatgctgcgcttgaaacggcttataatcgtagccataaaaaaacgcgccaccgttaagtgtcgcgtttcaattccaactaaaataggttcgtgaaaaattctttgatcccttcaccgattaaaacaaataaattggctttggggtccgccgttttagtgcgtaattgtgattgtggcgcttgtccgatataccgcgtagtgacaccgttcaattgtggcatcacttgaccaatttgcacattctttttaataggtgcttccaattggcgttttgcaccacctttgactgcttggtaatgccagtcaatgttggctgctgtggttccttttggcacccacattgaaatagctttgttcgtaatcaattgcactgtcttttggcgaccatatttaaccgtcgctgtcttataaggtgcgagactctgattggcttgtgctaattgtttttgttcccaaccatcgaagacatattgcattaacttgttagtttcaatgaaccgccggccagtatcttcaccattggcatgcatcaccactgttagaatccgttgcccatctttcgtcgcagttccggtaaaacaatcgcctgctttgtccgttgtcccagtttttaaaccatcgaccacgtagtcttgcggtgcattattttcgccaggtaacattaagttccacgttgacatggccgtttcatcacttgtttgggcgccaaatgtaaaatgcgcttgcttggttgtttcaagaatttcaggataatcagccaacaacttttgcgctacaagtgcgacatctgccgcactcatttcattttcagcatcagccggactgtctggataaacttcagcgccgaggaattcattgttcaagccggacactgaataaagttgtgcgtcttgaatgccccaatccgccactttttgccgcattaaatcgacaaaatccttttgtgaaccggccacttggttggcgagcatcatagctgcatcattcgccgaagcgaccatcatggcttggaaaagtgccttgacggtatattgtccgtccgcttgtagaggcacattcgttaaatccttattttgactcaattgataaatgaggtcatcgggcttcaccgtttgttcccacgttaacttaccttgcttaatttgcgctaacacgatgtaggctgtaatcatctttgtcatcgaagcgattggcaacgcctgatccgcattttgttcgtataagacttgtccagttgctgggtcgagcgcaattgctgcactcgcatcgatttgaggggcggtcggcaaactcaccggcgtacttgccgctgcgactttggtagtctgggcactcaaaagaccgcccacgggtgcaattaccaatacgaccattacatattgtactaattttttaaacacaacattactccttaactgattttgcgccagcagtttgaggatcaatccgccgacctaacttcaaaggtaagtgtatcacaaagctggttaattctggcgtcgaatcagcataaatataaccgccatgtaacgcgacaatactttgggtaattgctaacccaagtccagtgccacctgtttcttgtgaacgcgatgcttcaacgcgataaaagcggtcaaagagttggttcaatgaatcacttggaatttgttgaccatcatttgacactttaataatcgcctcttggccgattttctcagccgccaacgtaatttgtttgccacccttgccatatttcaaagcattagcaattaaattattgaagactcgaccaagcttttcagtatcggcttccatcatcagtggtgcaggattacaagttacattaatctgcatccccttcttattcgcttctaactcaaaactggccgctaattgatctaacatctgctccatatcaaacgttgtcttggtaatgggggtcgatgtttgccgcaccttcgtgtattcaaataaatcctcgactaagaccttcatttgttgcgccttcacgaaagcggtatgcgtatatttggttagttcttccttggtttgatactgattatcttcaattaaaccaagatatccgatgattgaagtcagcggcgtccgcaaatcatgactgacattggtaatcaattcgtccttactcttttcaatcttgcgttcttcttccattgaacgcacagtactatcaaccagcgtgttcacactatcgatcacgcgttgcaaatcacggttgacacgcaaattaatccggtggtccaaatgaccatcggcaatgtaatgcaactcaccaatcacgtgccacatctgcatttgatggtaacgccgaataagccgccaatagacgactaacacatcggcaacccccatcaagatgacaaaccaattttgccaactccaaatatgcgattcattcggaccaattgtaatggcgtttttaatcatccatacgccgccgcttagttgcggattattcacaatcgcctgttgtaacagcaccatgattgataaatttaatagtaataacaaaataaccgtgatgataccctcggcaaagagttcgctcttttccttagcggttagtgccactttttgcaggttcttttctccttgatagtcagccattaaacttctaccttatacccaacaccccagacggtttcaatcactttttcaccatcggttgcttcctcaattttgtcgcgcaaatgacttacatggaccatgaccgtcttggcagagacgatactttcttgtttccagacccgttcaaaaatatcgtccgctgaaaagacccggttggggtgactggcaagtaagtataaaatcccaaattcaagtgcggtgagttggatttgcttgttattaatcgtcgtcacttcatgtgagtcgcgcttaatgataagcggaccaacttctaagacatccggcacttcgttggccacttgttgttggctccgccgtaacaatgacttcacccgcgccatcacttctaatggattgaatggttttgaaacgtagtcatctgcaccggttaggaggccttgaatcttgtccatatcagttgtcttggcagacaccacaataatgggcacttgtgaatccttacggaccgccttaatgacttcgataccactcatattcggcatcataatatccaagatcatcaaatcaatatcgggattcgtggcaattttagtcagggcttctttacccgtgaaggcttgaatgggttcgtaaccttcgtttttaacataaatacttaataattcaacaatttctttatcatcgtctacaattagaattttcataatcgttacctcgtttaatttaacatcattttgcatgattcgctttcattgtaacaaactatcttctacttagggttaaagaattctttaaatcctccccatcatttaaccacaaaaaaaggatttaagtcgtgcaaaacgctcgacttaaaccctgatagaaatgatttaaattaccgtgctgaatagttaggtgcttctttggtaatttgcacatcatgtggatgtgattctgtcaaaccagcatttgagatttggacaaattgtgcattatcttgtaggtcctgtaaattagcagcaccaacgtagcccatccctgaacgtaagccaccaagtaattggtaaattacatcgccgagtgcgcctttggcagccacacgaccttcgatgccttctgggactaacttgttggcttcattcacaccactttggaagtaacggtctgatgaaccatgcgacatagcagccaagctgcccatcccacggtatgttttgaaacgacgtccttgatagatttcaaattcgccaggtgcttcgtcagtcccagctaacatactaccaagcatcacaacgtttccaccggctgcaagagctttaacgatgtccccagaatatttaatcccaccatcagcaatgatggttttgccatattcgcgggcaacactggcagcatcgtagatggctgttaattgtggtacaccgacaccagccacaatccgagttgtacagattgaaccagggccaatccccactttaacgacatcaaccccagcatcatacaaggcttttgtgccttctgcagttgcgacattcccagcaatcaaggttgcttcagggaagcgttcgcgaatttcactaatcttacgtaacacaccagctgaatgaccatgcgcagtatcgataatgatcgcatcagcccctgctttcaataaggctgcagcccgttcaaaagtatcgcttgtgacgccaacagcggcagcaactaataagcgaccatattgatccttagccgcattcgggaattcttgcactttttcaatatccttaattgtgattaatccggctaagcgaccgtcatcaccaactaaaggtaacttttcaattctgttttgttggaggatttgttcagcttcttctaaagaagtgccgacaggtgcggttacaagtgcttcgtgcgtcatcacggttccgatttcagcagagaaatcagagataaaacgtaaatcacggttcgtaataataccgactaattttagatcatcgagatttgaaacgattgggacaccactaatacgatatttacgcatcaaatcttcagcagcactaacgggtttatccgctgttaaataaaatggatcaataataacgccattttctgaacgtttaaccttcaagacttcatctgcttgacgttcaatactcatattcttatgaatcacgcctaaaccaccttgacgcgccatagcgattgccatgggtgcttccgtaacggtatccatgctagcactcataattggtgtgtttaacttgatattctttgcaagttgcacccctaaatcgacttcgttggggagtacatgactctccgcaggtattaataaaacatcatcgaacgtaaaccctttttttgtaaactttgattcccatgcagacataatcttcctccaatttgtgaactaaattaaccgccgacccatcgattgttcgtattatctttaatcgataaccagtttaaaatttgataaaatattagcagatttttctgcaaacgtcaataaactcttattgaaaattcattttcatcaatatcgtgtacgaatgaatcacgaacatttaaaataagggtgcacaccacccagcttcgttatacaatagaaataactgattataaaggatggattggcatgcaagaacaacaacgggttctagatttaacacgaagttataacctacgcgaattaggcggttaccaaacggttgatggcaagtccgttaaatggcacaaattattacgttcaggtagtttgaacgcgctaaccgcaactgatattgaggatctcttaaattacggtgttgcttacgatgtcgatttccgttcacgtcatgaaatcaaggtcgcccccgacccatttgatgacaaccaactaacctaccatcgtctttcggtatttccattcactgaccaagccgatacccctaaaaagccagccaaaaaaggcctaatgcggctttttggtaaaaaagaagctgctactcccgaacgatcaagtatggaccggatgtaccaacaattggtcaccgactcccatgctcaagcagcttatcgcgatttatttaccgtactattaaataatcacgatacaaacggtgcagtcctttaccattgctcagccggtaaagatcgcactggtgtcgcaacttttttaattctaagtgctctcggcgtcgactggaaaacaatcgttgccgactatgtcctctcaaatgaggtcctaggactcagctcagcaaccccaacccgaatttcaagtaacgatagccaggtcgcttcaatgaacgctaagagcattacacaggctaatctagaacttgtccgcgacacgattaatcaagaatacggcaacatcgaaaactacctatcaaaggcaatggccctcaaaccagaagaaatcaaacaattaaaagaggactacttagaatagcgtgcgactgcaaatggttatccgctgaggattagcctaaaaaggcgaacacaagcaattgtgttcgcctttttgaatgatcttttaatgactcttaatataattttcgccatccgctgctggtgcgacggccttgcccaagaaaatcaccagaataataatcgtaatcgcgtatggtgcaatctggaaccagacactattcacaccggccagtattgggatgtagccgccgataatcggcaaactttgtgcgagtccgaagaaaatcgatgcacctgtcgcgccaattggatgccacttaccaaaaatcatcgccgccaatgccatgaagccctgacctgaaatcgtcgctgcgctgaagtttaacgtaatcgactgcgccatcaccgcgccaccaatgccgcctaacaaaccagacaacatgaccccgatataccggtaacgactcacattgatgcccagtgtatcggctgcggctggattttcaccgactgaccgcaagcgcagcccaaatcgcgttttatacagcacataccaactgataatgccgaccaaaaccgcagcgtaagccactaacgacgtcttcgtaaataaaatggggccaatcactggaatttgggccaagccggggaatgtgaagttaccgatgctttgattaatcaccggcgtttgccccttaccgctatacagcacacgggttaagaagacacacaatgcaggcgccaataggtttaacaccgtcccactaataatgtgattagcgcgcaatgttacggtcgctaaagcatgtaataaggagaacagtgcaccaaacagtccaccaaccaataaggcaatccacggcgtcaatccgccaaaaaccgtactaaattgaagggtaaagacggcactgctgaaagccccaacaatcataatcccttctaaaccaacattaatcacaccgctatgctctgaaaaagcaccacccaaggctgtaaaaatcaatggcgccgcgtaaactaacgtggtcgcacaaatcgtcattaaaatcattgtgattgtcattatttttcaagcctctctttcatcaacgcgtgttttttcagtaagcggtgattgagtaattgttcaaataagaagcgcacacccacgaagaagataatcgatgcaatcacgatattgacgatttctgtcggagttgttgagtagacggaaatgcttaagccaccaatctgtaaagcagagaataaaatcgccgcaaagataatcccgattggatgcccattcgctaataacgcgaccgccattccattaaagccgatatctggtaaggcatttgaaacggaaatattttgataattccctagaccatcgacagcccccgctaacccagctagtagtccagataatagcattgcccacataatcgtttgtttcgtattcatccccgcgtaacgtgcagcttgttcgttcaatccaactgccttaatttcaaatccagtcttcgaccgtttcaaataccaccacatcacaatcaccaagactaacgcgatgaaaaagccccagtgaaacgttgagtgattggtaatctgttccaaaaaaggggtccgcaagcttgctttagggacaatgttggccgatgagtcgctgccttttggcgccaaccaacgtttaatcgcaaaattgacgaaatacaatgcgatgtagttcaacatgatggttgtgatcacttcactggttccaaagtaggcccgtaaaaaaccggccaaccaagaccaaaagccaccgagcagcatccccgctaaaatcgcgccaagaatcaagagaatccccggtaaatttttaaagtggagtgcaaagacaatcgcgccaaaccagcccactaatagctgacccgacccaccaatattgaaaaagccggctttgctcgcaattgaaaagccaagggctgtcaaaattaacggagtcgcattgcgtaatgtctcgccaatcgaatagatatcgccgaatgcgccattaaagaggttactgtaattttgaataggcgaatatccaaaaaccaacatcacaactccgcccactaacagtcccgccacaacggataggattgcaatgattaatcctgaagattgttgtttattcattcgtctcgccctcctactggttgttgcccggccattaataatccgagcgtctgactcgttgtggtttgtggatcaacttcaccaacaatttgaccggcgtgcattacaagtactcggtcagctaactttaaaatttcatctaattcaaaactaacaagtaaaatcccacagccttggttccgttgttcaatcaagctctgatgaatgtattcaatcgcacctacatcaacaccgcgggtcggattggcagcaatcaagacttttggttgtttggcgatttcgcgcgcaaccaccactttttgctgattgccacctgaaagttctccggcaagcgtttgttcagattgcgtccgaatgtcgaatcgtttaatcagtttctgcgccgtttgattgatcacccgataattaagccagcctagatgactatacggttgatggtaataatccttcagcgctaaattttcagcaatcgacagtggcaaaatcaaaccgatattctggcgatcttctggaatgcaccctaagccttgttcactaatttggcgtggtgtccgtttcaataatgactgacctgctaattcaatttttccagactgcggttttaattgtccggttaaaacctgaattaactcactctgcccgttgccatcaatcccagcaattccaacaatttctcccgcatgcacggtcaatcccagatcatccagaacagtgcgtttagcaacacgagcagcgacatgttccaccgatagcatcacagcgccttgattagccattttcggtgtgggggcttgttgcggacggccaaccatcatttccgctaattttgtcggatccgtttgtgcgactagtaccgtatcaatcacacgtccggcacgaatcacgacgcaccgatcagcaacttgtttaatttcctttagtttatgcgtgataaaaatcaacgacttcccttccgcctttaacttctcaaaaatggcaagcaaggcttgaatttcattcggtgtcaaagctgcagtcggttcatcaaaaatcaatgtcgttgcttctcggtaaagcgccttgataatctcaacccgctgttgcatcccgaccgaaatatcagcgatttttcgatcaaggtcgagcgccagttggtatttatcgactaaagccgtgaccttttgccgcgccgttgcatagtcaatccggccctgtttagttggttcgtcacccaggataatgttttctaagaccgtaaaagccggaattaacatgaaatgttggtgtaccatcccaatcccgagggcttttgcatgtcgagggccatttaaggtcactgcttgtccgttcaccagtaattgccccgcagtcggctttaattgtccggtcaaaacacccatcaaggttgatttccccgcaccattttcaccaagcaaggcaaggatttcaccctgttgcaaggttaatgaaatatcatcattggcggtaaaggcgccgaaccgttttgtaatgtgctgcatttctatcacagtttttgccatttttacgctccattcattaagcatacaaaaaggatggctgataactgctgccatcctttagcattcaatagtcgttattctgcagcaactttaatggtgcctgattcaattttttgttgatattctttgactgcttgccatgtttcaggggaagcattgtcgttcactaaggcaacgcctttgtctttcaaatcatatgtgacggttttgccaccagggaatttatcattcttagcttggttagcaagatcttccactgctgtgccaacttgtttaacggcagatgctaatgtgacgttgccaccatcatatttcccatcggctttttgatcttgatcaacaccaatcacccagactttttgaccacccttagaaatgttcttagcagcggtaaagacgccagcgccagtgccaccagcagcgtgataaataacatccgcgccgttgttgtacatcgcggttgccaatgattggccgacatcggctttcgtaaatgaaccagcatatttcacatcaacggtgattgctgggttaacggctttcaccccttgtttaaaaccagcttcgaatgttttcacgacggcactatcaattccaccgacaaagccgactttattcgtcttagtggttttcgcagcggcaaccccggctaggaatgatgattgttctgttttaaaattgacggacgcgacgtttttccgattcttaacgtttgaatcgatgattgcaaagttaacatttggattattctttgcagattggctgaccgcgttatctaacttatagccaatcgcaaaaattgtttggtattttgccttgattaacttattaatgttcgggaaaaagtccgcatcagaactcgattgtgcgtaattgtaaccattgaccccttttttaagatcatgactagcaccccatttttccaaaccttcccaggcagattggttaaaagatttatcatcaatcccaccaccatcagtgactaaagcggctgtgtgcgttgctttctttgatgctgtcttttgactcccgcacccggctaacacgccacctaatacaaggactgtcgagaaaagtacgaccaaactttttttcatgaaataagcctccgtcaataaatttgataatttattataaacacgttatcgacataaaatcaatacatttatttcattttataaaatattgttcgtttatattgtatttgttgctaagaaatatagataatgctaatattaattgataactaacgaacaatcaggaggcgaaccatgcaaacacaagtctattttaatcacgatggcggtgttgatgatttgatttcattaactctgctcctacaaatgccgacaatcaaactacttggcgtcggcgtaattggcgctgattcatatgtcgaaccagccgttagcgcgagtcgtaaaatcattgatacgttttcagatcaatcagcgcggttagctgtggccgcttctgactcacgcgcagtccatccttttccaaaagaatggcgaactgacgcttactcagtcgatgcacttcccgtgctaaatgaacgtggcaccgttcaaacgcctctgagtcctgaagccgcacatctcgatctaatcactaaactcaatcaagcaaccgaacccgtcacattgctctttaccggcccattaactgacttggcacgcgcactcgccatcaatccaagcatcgaatataaaatcgctaaacttctttggatgggcggttcttttcttgaacaaggcaacgttgctgaacccgattctgatggtactgctgaatggaatgccttctgggatcccgaagcagtgaaaactgtcttcgacacacaaatccctattgaattagtcgggctcgaaagtacgaataatgttcccttaacgccggcgattcgccaacgttgggctagcaaacgtgccaatgccatgatggactttatcggcacctgttacgcctttgttcctcaactggtccatttcaaaactaattcaacttattatttatgggacgttttaacaacttgttaccttcttgatccaacaatcgttaaaacaaaagccattgtatgtgatgtcattccaaacggaattgccggcgggcgcacgttcttaactaaaaacggacgtccggctaaactcgtctacgacgttgatgcagctggattttttgatctaattgaaaccatcataaaagcagactaacgcaaaaaggagcaccgacttatcagtcagtgctccttttttgaacgtgctttcatcaacagcttcctgtgctttgctacacttagcaaagcggtgcttgcagcgccaattcgctaagttaggcaaatgctcagaagctacccgttgatgacgcactccttttttgaacgtgcttgctaaactaggggaacaactttgtaaaggggctgtttgaatgacgactgatttcaatcaagaacaagcgcatctatccactgtttatcaacaattaaccaccactttgacggccatcaatgatacccaatcgcaaaaccagaaaaacggcaacaccatcaaagcgcagatcaccggtgaagccaaactcaatttcgattcatacgctgataatcttgatacattcgctgctttagaaagtatcaacaaggaaatcgatatgctcaacctgaaaaccgattcgctcgttgcacgtcatgatgagaccttacggctgttagagcaaccctactttgcaaaaatcacgctgacttttcctgagggaatagacgccgaagatttttaccttggttcagctagcttcacaaaccaagccggcgatcctgtgatttacgattggcgttcacctatcgccgatgtttattaccagcaaacattcggccccaccagttatcaagctaacggtcgcgccattgcggtcaatctcgaccgacggcgccagttccaaattcaagctgatcagctaatcgatttctttgatacgcagattgccatcgaagatcccttgttattagccactttaaaagaagccaaaacaacgcaaatgagcgccattaccgcgacgattcaaaaggaacaaaacgcgattattcggcaacaaacgactgaccatttactcatcgatgggattgcgggcagtggtaaaacatcggtcatttttcaacgcatcgcctatctactctatcggcaacgcaaagaactcgcattgaacgaagtcctgatgatttcacttaatcgcctatttcaagactatatcgcccaagttttaccagacttaggtgaacaaacaccagtcaacttaaccctacaacaactattggcgcaattgttaccttctgatctagccgcactccccatcgctgatcaaccagctactttgaccatcacacaattaacgttgcaggcgagcgatttccaatctttaagccctggtttaccgctgacgattgatgccgcaacaagctaccaattcttcttaaaaacaccggtggatcccccgcttgataaacgaatacaagcaactcagcaacaactcacaagttgtctacaggaaagcatcacaaatgaagcccaatcagcagatgctttaactcgacttgaaagcctcactgaaaccgagcaacagcgcttattcgaccgcttaattcgcgaagatgaaccactagcaccgctagcacgcaaaatgattcgtcatgattaccaagacttagctgatcagctaagcggttatcaatggcttgcttttgatcaaataattgcccgtcaaacaccgattgatgctgttattgcagctcagatttatgcttatttaacgcatcacgtcttcccaaacgttaagcaggtctttatcgatgaagtgcaggactatcacgcaagcacgttatctctttttaaacaacttttccccaaagcacagttcacggttttcggtgatcagcatcaaagtatcaccccgcataaagtacaattcgaacaattacccaccatttttccacaactacaaactgcggcactgcgcacaagttaccgctcatccggtgcaatcacgacgttatttagtcaactattcaccgatttaacagatgtccatgccgttcaaccagccggcaagcggccaacgacgatttgtgcgactgattttaacgactacctcacccaaatccaagctcagattgaccaactaccaactgaccaaaccttagccatcatcacgcctgctggtgactttgacgagcagttaactggcctcaaaaatgtccaccacttatccacagaaacgacgaatctccccgaaaccggcgccttcactttaccgctgacgctggctaaagggttagaatttgataacgttttgttgtacgatctgactaacaattattataccgagccaactgtcggccgcaaccgcctctataccgccatttcgcgggcaacgcatcaattgacgctcagcgcactgggcaagttgccggttgaattaaatggccaataaattggtcatttgactgactaggctagtcctcaaaatataaacgctcgctgtcgcactctattcaaatacaaactgattgttgtacagttcggcgtagaagcctttttcgtctagtaattcttggtgactgccttcttcgatgatgcgaccgtctttgaggacgataatgcgatccgcattgagaatcgtctttaaacgatgggcaatcacgaaactggttcggccttggatgacgttgtccatcgctttttggatatgactttcagtcaccgtatcgacgttacttgtcgcttcatccaaaattaagagcgctggaccggtgataatcgtccgagcgatactgatcaattgtttctgaccggtactgaagatgttatcttcttcactgacagccgtttgataaccatcatctaacgtcataatgaagtcatgaatgtgggcttgctgggcagctaccaccacttcttcatctgttgcatcgggtttcccgaagacaatgttgtcgcgaatcgttcctgagaaaagcacggattcttgcaacacgatgccgacgtgcgagcgtaatgcatccaaatccatttcacggatatcaatgtcatcaatcttgactgcgccttgatcaacatcatagaaccgattcatcaagttcatgacggttgtcttcccagaaccagttggaccaaccaacgcaatcatttggcccttatccacttcgatattcacatcatgcaaaatttgcttacctggtaaatagctaaagtcgacatgttccatggtcacggagcgttcaatgccctcaaattgcacaccgtcggttggacgcacttcatcgtcttcatcaaacacttcattcactcggcgggcaccggtaattgccaattgaatcatgctgtaactcgatgaaagttgtgcgatctggttatagaattgttgtgaatattgaacgaatgttacaactaaacccaaagcgatcgactttttaatgtcaccgttcaccgctaaccagctaccataggaaatcacaattgcggtattcaccaacgacatcccttgcatcaacggaaagatcatcccagaataaatctgaccttttaaagtcgccttgcggacattttcattatgttcaatgaagccatcaatcgtttcttcttgaaggctgttagtaataatcactttttggcccgtgattttttcgttaatgtagccattgagtttcccgacttcatcttgttgcacattaacgtatttttgcgctttattaatgatgatccaagcaaggatgaatgaaattgggacggaagcaattgtcacccaagcgagctgcacatcttttctaaacatcataatcaataaaccaattaagagcgccgtgcctgatacaagttggctcaacacttgattcatcgcattgtaaatattatctaagtcactcgtaaagcggctgagaatatcgccatctgaatgacggtcgaaatatttaatctgcattttttggagcttattgaataacccaatccgcatccggttggttgataacgcgttgacgcgtgagaaaaccgcgcctgataccaacgtcgctgctgaactaaagacgtagaataaaatcaacgatacaatcacctctacgaaggcgtctttagatgccccactggttggcaaatgttgggcttttaaaatttgaaatttcgttgcatatttgactaactcattgagcgcgtccccgatatattcgggtgctttcacctgaagataagtcgcaatcacagtcatcacgaggatgattgcaaaagaaggtttataccgctttagataatggaaaaagaacttcattgctcggttaaattctcgcattggttatcctcgctttcctttttgcgtttcaaagatttctcgatagacatcactggtttcaagtaattcatgatggttaccaacaccgactaaacgaccttcatctaacactaaaatccgatccgcgttgaccacagatgaaatcttttgcgcgataattagtgttgttgtgccagctaattcacggtctaacgcctctttaactaatttttcagaccgggcatctaaggcactagtactatcatccaaaatcagaatcttcggttgcccgattaccccccgtgaaattgagagccgttgtttttgaccaccagagaagttcgcactgcgttcttcgacggttgcatcatattgatcagcaagcttttcgatgaactctttggcttgggcaatccccgttgcgcggtccatatcggcgtcatccgcatcttttttcccgtgcttcaagttttgtgcgattgtgccggagaataaaatcgctttttggaggacaaatgaaacggcgctgtgtaaattatgttcgtttaaatctttgattggcacgccgccaattttaatctgcccttcagtcggatcgaacaagcgcggaatcaattgcgccatcgttgacttaccggccccagttgcgccgacaatcccaatcatttcaccagcgttaattttgaaattaatatctgttaacgtgttacgatcgtcttctggataacggaagctgacgtgatcgaattccaacgtccccgctaagttttgatcagggacatctggataaacgatatcaggctctgttgaaagaatttcttggagtcgcttcaacgaaactgccccacgagatgccatcatcatcatcatgccgcccatgatgatcgacatcatgatttgcattaagtaattcataaatgaggcaatcgccgcaatcgcttctggatccgtatcgactaagttcccaacgaaatagattgatgcgacaaccgctaagttcgccaccaacatgaacgctggaatcatcacagaaaaaagcatcccgacgattgtcgtatggtgttctaattgattgcttgtttttgagaagcgactgatttcgttatcttcttggacaaaagacttcacaatccgcgtgcccattaaattttctttagcgaggttattaatcttatcgattaaattttggatggcaccgaagtgtttccccatcgaacccattgataagaatgtaatgatgaagaccgcgatcactaagagcacgataatccaccataaactcggaatcgaattcatcgcaaggatgaaactgccgacaaataaaatcgggattctaaaaatcgtttggagcgtcatcataatgacgttttgaacctgggtcatatcattggtcaaacgcacggataaattcccaactgagaatttttcaatattggcaaatgagaaagtctgtatcttccggaaagtagtttcccgcatatcggcagtcattccctgcgccgtcatcgccgacgtaatggtgttgaccacgcccgcaattaaaccaaccacggcaattacaatcaaataaattccaatttgacgtaccttatcttgatcgcctttcataatcccttccaaaacatcttgtaatagttttggttgccatagtgaagacgcaacagaaataaccgtcgctaaaatggaaagactaaacacgccccaataaggctttaagtgctgtttaagtatcgacatgagcatccctctttttctgtagttgaatctcctgtacaaatcctgtacagtataatcgaacagtgttcgagttactactttatcaaattttaaaacgaattacaatcatcttttcataaaaagtgaaggagcttcattaatatggtaaaacagtcaatctctgccgagcaaatcatcactgccgcgtttgaaattttacaagcatccgggaccgtcgatgccctttcaattcgtaaaattgccaatcaattagacatcggggcggccacattttactggcatttcgaaaacaaacaagccctcctacaggcgatggctgataacattattcaacaaattgagattgagccatgtaacacaaccttagaatggacagaccaaattcgccaaatttttagcgccatttacaccacttacatagcacagccctatgccgctgagttgatgatgcggaccgtccctgcaactaaggcccgcctaggtcttatcaaccacttaattcaaatccttttggatgccggtttcacgccagaacaagcaagcctagcgattgaatccatcgatcacttcatgtccggtctcttcactgacatcaccggtgagcttgagatgaaacatcgcgtctcacaacataaagacacttatcttgcacagttaccgcttaaaatgcagcagattgcgactgacaatcattacaatgctttcttaaaaacttttgaacatcatcggcaccaacaacaacgctcactggaaaaattcatgctaggcctcgatattttcctcgctggtttgcaacaacaacttgcttaaataaaaagcgcgcagacaactgattgtctgcgcgctttttacatttaaactgcttttgaacgaatcccgaatccataactcagagccatcacgccaacaatcatgatcatgtataacggtaatcgagtattcgatcccgtatgcaatagactcatgccgtacgttaaggcgctgattgcgaggtagtagccaaaactaaacaacccgctggccgtgccgatcacatcttcgtaacccactaacgctaaattcaagaccaccggtaaggtcgtattcaatccccacaagaaaagaggccgtgggacgacctcttcttttgtgggtttctagctttaacgcgctttttgaaactgacttctgtgcttagctccaatccgtaaacaatcgactacgtcgctcatttacagatttaggctagtgctcgaagtcaaaccgtttcaaacgcgcttctatttctttaacgtgcttttaattcgcaaccttctgcgccttgctacatcaaccagacaatcgcccttggcgcttatccttctgattaggcaagtgctcaaaggctaaccgcgaattaacgcactcatttttttaccagcttgcttttttgacgcctgggatttggcctttatgggctaattcgcgaaagttgatgcggctcataccaaattgccgcatgaaacttcttggtcgaccatcgattgcatcgcggttccgcaatcgcactgggctagaatccttgggtaattgagaaagggctaagtaatcgccctttgcttttaattctgcgcgcaagtcagcgtatttcgctactaatgcgcgttgttttgctaattttgccacttttgatttttttgccattgataaaactcctttttaccgtgctttcaaaaacatcctgttccggttagctacattagccaaacaatcggttacaccgctaatttggctaatcctcacaggataaccacttttgacgcactcattttctttaacgtgcttttaattcgcagacttctgcgcttagcaccgtgaatcaaatcatcgacttcgtcgctaattcgcttccccgtactaatactcaaaagttgattaagcttgaacgcacttttacccgattgaaatagcctacgctaactatttatgaaatgcaattaaaaagacttataaaaagtaaccatttttcaacactggcctgtgctatacttaatctaagttgatttcacagaaaggggcactttcagatggcccaaaaaaacattctccaatacttaattctcgggctgttaaatcagtctcccaaaaccggttatgatttaaaacgcgtctttgaagatgatatcggtgagttctggcaagcccaacacagccaaatctatcctgaactcaagcgactcgaacaggctgatcggatcacccacgtcgaattgatcgccggaacaaaattaaaaaagaagcagtattcaatcactgcagatgggattgccttttttgacgagtggcgatactccccaaccagcgaaattattgccagcaaagacgaatttattttgaagctatactttatcgactcaaaaaatgatgctcatttagacgcaatgttcaccgaacaaaaaaccttacaccaagccaaactggatcacctactcgaccggcgtcaaacccttttcagccaacaagctgcggtggatgcgcactatggtcattatcttattttagaacacgcgattaaccgcgaacaagactatcttaattggttaacaaccgcacggccgtaaaatcgacccttaacaaatttgagataagtgctatcctattagtaagaagtaaatcaagttaggctgtttcttcatttgtatacgttataataacgcgcttgtacaggtggtcagttgaccaattgtatgggcgctttttttgtttgatccagcaacctagactttaacaaattcaggaggaatattattttaaagcgcaagaatgttgataaagtcgtcttcatccccacgatgttactgttcgggattgtctccgcatttttaatgttggggggtgacacgcttcagcagtcgatttcacaactacttgatgtgatgacggcacattctaaatggctttacattggtatttatatcattaattttattttcctattttggttggggtgtagtcactatggccatatccgcctcggccaaccaaatgaaaagccagaatataacgacttccaatgggggagtatggtttttgcaactgggattgacgctagcatcttaatgcttagtaccactgatccactgcaatacttacagaacccaccatttggcgctaaacctttctcggctgaagcataccgctacgccaacgtctgtgggcaatttcactggggacccatggcatggatgatttttgccaccgcgactgtcgcaattggctacgctctctatgttaagaacttacgggtacaacgtttaagcgccgcaatcgacctattagaaggaccacaaccttacaaaaaaataattcgcaaattaatcgactttaccgttgttttcggcattatggggggcatcggctcatcaatcggaatggaaattcccgtgatttcaaaagtcttgagcacaatgaccggtttgaatgataccatctggcttaaacttgccctcttcattatcttactggtgctattcaccctcacggtatatgccggcttagataaaggcattaagaagctcagtgcttggcatatctatactgccattggctttttattactcgtcttactaatcggtccgacattcaagctaattggcgctgaaggccgcgatgtcttccatctctttggtaacttcgggcgtttaagtttaaatcagactggtgcacacagtgcgttcgcacaacacgaaaccctcttttactggggatggtggttatcttacatgcctgtcatgggcttattcatcgctcggatttcacgcggccgaaccattcgccaagttttattgggaatggcgacatacggcgcatttagttgtatgagcttttacgctgtacttggcggttatgcgctcttcttacaacgttccggtcaaatcgatcttgttcatctattgaatacccaaggacaagccgctgtcatcgcggcggtcatcacgaccttaccgttcaaaattatcatgttagcaattttctgtctgtcatgtttcattttcctggcgacaacgatctcttcttcggccttcatcgtctcatcatttaccagtcttgaattgaaaatcggagaacaacctaatcgttggaatcggatggcttgggtgatcattttcattctattttcacttggaattgtacttgtcggtagtttccaaaccattcaagccgtttgcgtgattgctgggttcccattgatttttgtctgcgcattattgctcgtttcgatttttcacgccgttcatgatggcgagattcccattgaaattgaaaaagaagaaacttctcattttctgaaaaaaaagcttacgccgaaattttttatgtgatacggttatatctgttaacttttcagaaagaagaaatttaaaatgccaaccaataaaaaagaaggtattatttttacgacattaatgtgtttttgcatggtacttggaatgagtatctataacttaatcctccacgatagcctctcatggggcgctttattcaccggcttaatcccaggcttcatcgtcgctttcatcctcgatgttttcatcgttggggcaatcgccaaaaaaattgcttttagtttaccacttaataaggacaataaattagtcatgattttgacgatttcatgtttgatgattcttggcatggttacatgtatgtcacttttcggtattcttatcgaaggtggtatccctgcacacttaggtagcgtctaccgtcatacttggttaatgaacgttatcgtcgctttaccattacaattaatcatcgtaggacctttctcacgtacgattcttggtaaaatccaagcaaacgcaaccgcaactgaaacagctgaataaaaacaaaaaaaaacgacgactagcttacgtagctagtcgtcgttttatttatgctaatattttttgaatagccgctaattcttcggccgtaaacgttaaattatctagtgcatgcacactgtcttgtaattgactcaagcgcgaagcaccaactaacacactggctacagtcggctgttgtaaattccacgcaagcgccatttcagccaatgattgcacacgttgttgcgcaattttgttcaattcttgaaccgtactgattgtttgatcaaccttttcaggtgatagggagggactatctggacgagcttgcccgcgaatcggctggaatcccgtttaaataacgattggtcaataatccctgtgccaacggactaaacgtaattgcaccgataccttcatccgccaagacatccgttagtccatcttcaatccatcgatcgagcatgttataacgtggttgatgaataataaagggtgtcccgagcgctctgaaaaccttcgtaatcgctttggtttgttctgccgaataattcgaaatcccaatatatagcgcctttccttgttgcaccaataaatctagggcccgagctgtttcttcaatcggcgtatctggatctggtcggtgatgatagaaaatatcgacgtaatctgactgaagtcgttttagtgactgatcacagctagcgataatattcttcttagagccccactcactatagggaccgggccacatataatagccagccttcgatgaaataatcatttcatcacgatagcgacgcagattatcatgtaaaatccgctcaaagttttcctcggcgctgcccgctggtggcctctaattattcgccaaatcgaaatgagtgatgcccatatcgaacgcgccaaaaatcgtttccttttgagtcgccatcttatcggtttcaccaaagttatgccataaccctaatgaaatcgctggtaatttcaacccagaatgtccgacgcggttatattgcatcccttgataacgggtttctaatgcgtgatacatgtacaacgccttctctactcaagtattttgactatttagccgatcgtcttaattgcgtcttccactaatccccagaacttctgatgatcgagttttacagcgactgatgtgtgacagtctgttggaattgggaatctaaaatcggcgaccgtcatcccacgcgtcaatgttccattgagttcgatatcaacgggcactttcttagtggtcatcacacttggatcaatcacgtaagccacggcacatggatcatgaacgggcggtgcatcgaaattttgccccttcttgtacatatcgcggaaaaaggctaacaaatcaaccacgaactgagacgtttcagtatgaatgccttcaatttgttcaacaatatctggtgtcgctaacgcttgatgcgtcaaatccaaaccaaccattgtgacatcccagccggcattgaatacaatcttggccgcttctggatcaaatttaatgttaaattcggccactgcactcgcattcgcttcgtgataaccgccacccattagaacgacttctttaacgcgttcaacaatcttaggttctttgcgtaccgccattgcgatgttggtcaacgcacctgttggcactaatgtaattgtattagctggatgcgtcataattaaatcaatgattaaatcaactgcatgacttttttcaagcgccaccgttggttctggaagaacaaccccgtcaaggccagtctccccatggatatcagctgctactttaatttcttcaattaatggtcgcgaacacccagcagcaatcggtacatcgtgcatgccgatcatggtcgcaactgcgagggcattgcgcgtcactttcgttaacgtctgattggcagccaccgttgtcactgccaacaaatcgatttctggattgccgtatgctaacatcattgcaacagcatcatcatggcctggatcacaatcaagaattattttctttgccattcgtaaaacctccactctctttcacttcgtgcatactatcactatagaatttaagcggtttcaagtcaaccatatataataaaattcaatcatgaaacggagtctattatgcgcattgatgctggcgaataccctaccggcgaaaacgccgtccaccctaagaaagttaaacgtttaaaattacttagcaaggttgcaacaatcacctgtattacgctgtatgtttcatacatcccccaaattatcgctaatttttcagggtcacctgtctcacctttacagcccttagtcgcaacaattaatgggtgtctatggaccgcctatggctggaataaaacctataaagattggccggttattatttctaacattcctggcgttattttcggactcgttaccgtaataactgtttatattcactaaaattgtttgttaaagccacgatttgcgtcaaataatttttgataactaacagaaaagcaatccatcataagttgcttctctgttatttttttgtccctttacccaaacataaaaagccaaggtgattccttcttttatcgaaagaaaaccatcttggcttcactttgaagtaccgactatgggactagtcggccttaagcttgttattttgctgctcgtttaacgtatgtgccttcttgtgtgttgatttcaaggacttcgtcagcgctgatgaaatcagggacactaacgactaagccagtttccatcgttgcaggtttacctgaaccagtcactgttgcgcctttaatcgaaggttgtgtttcaacgacccgtaagttaacagtagttggtaaagtaaccccgatcacttctgaaccgaagaattgaatcttgcagttcatgttttctaataagtattttaattcagcttcaatagcagctgtttgaatttcatattgttcgtaagtttcaagatccatgaagaatgccacgttatcttgtgtgtataagtattgaacatcttttgtatcaatcattgcttgttcaactttaacttctgggcgcattgttgtttcaacaattgagccagtccgtaagtcacgcaacttaacacgcataaccgtgtttcccttacccggtttatgatggttagcttctaaaactttgattaacttgccgtcttgttcaaacgtcattcctgctctgaggtttactgcttcaatcatgacttgatctcctttatttaaaaaaatattcatctctaactgtaccaaatgaaagccgtttaatccagccctcctgtggtagttatcctatttaatgtcgagtttatgaatcttatccgctggttgtggctcataatgttggtacatcttcgtaatggccaccttaggtaagcctgattcactaatataaatattaggtttgaggtatttcttattttgcacatcctttaagtgataatgttgaatcacttgtttctgatggccagtcggcgcttcatcttgaccatagaattgaatcttggctaatggtaagctaatcgttgcattattaatcttgaaataagcaacatctcgattgctgccaagatacgtcatcttttgttgcttatcagcttgatagaattgctcgatttgcttcatgctgtgattatcgaccagccggacaatcggttgatcacctttgaaaaggtgtaagccatctagcgactggcgcacgttttgagcactcaacatcaaccagacaatcaccaacatactgataaagtacacaatatgtaagctaagactgctagcagcatgattcaaactaaaagtgtagctatcctctagctctttattcatgatttggcgccgaatgcgcattgcaataatcttatacgataggtaccacactacaagcgcgactaaggttgccccaaaagctgtcaaaattgtattttttagaatttctgaatccgtcaataatggactaaagccgctcacaagtttaattgtgagcgcgccaaggattagaatcacaaccatttgtagtacaaaaaaacgggtccgaatacttttgctaatcttcgtgggtgttaccactttcgtcttatctcccataccataaatcctcccttgttaacctacttaccattttagcataccgtttccatcaagttgattaaaagtccctcgttggcttattttttacaaaggcatctttcttcaaaggtagctgttcaatatgataaggtgtagttaatcaaacggaggtgtcgatatgttatatccagaaagtttaactcaattactcgccgattcaaatcagccagtcatctcgttattcattaacttagagactggcggacaagccattaatgcgaacaagattaagctcaatagtttttctaagcaaatccgtgaacagttaaccaccgactatcctgaagaaaaagccttactcaaccaacttgaggacttactaagtaccgctccccaagaattagcacatatacagtcagttgcgttttacatcacagctgctggtcactacagccaaccccttcattatccgatcacgactgaatattttctaattgctgatcaacccgacctgcgtccactcagttcggaattaagtctgagtctgaacgggaccattctctgtctcaacaagactacttttagtttgaaatccattcaacaaaatgtcattcgggattatcctttacctaaagacgccccaacaaccattgaaattgggattggcacagagcgtaaaggcgaagtcgtccaaggcttctcaagtccaacccacagttttgttgtaaaagaaaatgaacaacttatcgatcaaactaactatttccgcgtgattggccgctatcttgatgacttgctgcctgaaaaagcaccgatttacgtggtcacattacccggcaacttaaatctcttcaaggaactcgtcgttaatccaaactaccggatggatcaagccatccaaacttcccctgattctctttcagatgacgacttactcgacaagttactcacaaatgcgcgtcatgaactccgacaaaaagcgctcggattagcagaacgggccgctagtgcgtatcacggcgattcaaaccttggtgatcctgagattattctttcacgcattaacaatcgccaactaacagcactcattatcccaactgcacttgcaccatcagcaacaatcagcgccgatcaaatcatggatcttaatcacatgatgattgcggccatccaaaccggcctgccattctacccagtaccagttgaaaatattccgacaggactggtggcggtgggaatttaactcttaaaacacgtgccaatacagcaacgtatattcaagcgttgttgtactggtccgtgttttttgagttgcaaatacttgatctagataagctgccagttggtccgttggtaattcttcgtaataggcctccaaaaatagcctgtcgaaaacttcacttgtttgatattgaaaaatttgttgactaacttggtagcccgcatcttttaacacgttttccacagccgggatgatttccggtgtagtgttgggatcttgctgttcaatcccaaaataacgttcaagcggtgtgaacaagtcgtcctcgtttttagtgagccgtaagaatgcacaccactgacggctcttttcggtaatcgtcagtaatgcttgattggcttcgattgccggatttaacgccatccaaattaaatcatagcttttttgtggcgtttgcgccataaaatcagccacagactgctgtagataagcaatctgttgttctggtacatgctgtttagcttcttgttgtgcatactggagcatttgcgccgagatgtcgataatcgtataagcctgactgttttgcactagaggtggcaaataacggccgctaccaccacctaagtcagccactgtctcaacaggcagtaatcgccgatcctgtaaaaaagccacaacgtcagtgacaatcgacacctgtgactcttgttgaatctgatagtattccgctgcaaaatcatcccaaaaagctgcgacttcattatccacaatctatcctccgcttaaacttttattttctcagcttagcatataaaaaagatgccgacaaaataaattatcgacatctttttgaaacgtgctttttggttgcaccaacctccgcttaatctaaaatactcagttgctatccgcaaccgaacacacgcttttttaaacgtgctacaatcgccatattcttccgttgttaggctaatcctcagaatatctccggcgattttcgcactctttatctcactaccagcactgggattggtgcgtattttgccatgtaggcggcttggctgccgaagtatttagcaacgcccttttgtgatttcgaaccgacaattaacaaatcgggtttaaccttaggaatcacatcttcgataatcgcttcgcctggttcgccttctgcaattactgttcgcacatgattcacaccgcgcacataggcttgatcttgatattctcgtaggtggttttcaagatcctcatattggccgtggataaaatccttgttcaatgcttgatagacgttcatttcgtcattttccaataccgatacaatgactaattctaaatcctcgcgtttagcccgctcaattgcataatcaaacgctaataacgcatcctctgagtcatcgaccccgactaaaattcgtttaatttctaaaactgacatgtgaccaacctccaattaattttcagttgctaattgctgttcaaaccgcttattgcctttatacaattcaataatcatccaaaccaataatgccatcacaccagcaatcaacacatatgcaatgcgatcagcagtagccaattgtgcagcacttgcgtgatcaccatagaaagcttcgatttgtcctggcaaccccatcatattcaaataggtcaagccaatgaccgataaccaacctaagcttttaatcaaccaactattcttgaagcgatcccccatctcaacccggctgtcggtaaacatcaacagtggcagcattgaaaatggtaaggcaaacgctaagaaaacttgggaattattcatcaaggtattgagcgcctcatgctcttccaaggctggtttattgctggtcatcatgacgcagattaataccggaatcaccgataacaagcgggttaccaaacgccgcaaccacaatggcattctcaagtgaatgaacccttccatgatgacttggccagttaacgtcccggtaatcgttgaattttgcccagaagcgagcaatgcaacggcaaacaaagttgataagattccggtccgggcaacacttgcaagaattccgttactcattgttgaggtatctgacaaagcttcaaataacccgaagaatgatggatctttaaccgttcccgttttaaaaactgcaacccccatgattaataacaacgcattaacgaaaaatgccatcgtgagttgaatgtttgaatcccaagtggcaaagcgcactgtttgtgcaacctgtgcttcgttcttgcgatcaatcttccgtgtttgcgaaatcgcagagtgtaaatatagattatgtggcataacagttgccccgataatccctaacgcaccagtcaatggggttagtccaccaacagctggcccggtggcaaaggtcttagcagttggtactagcccaacaatcacccctgcccaatcaggatctgagagtgctacttcataagcaaaaaccacaaaaatcacgacaattaatgcgacaacgattgcttcaatcttacgaaaaccaattttcgttaagagtaataatagcatgacatctaaaatcgtaatgaatactgcaatcagcagtggaatcttaaataataagtacaaagcaattgccgccccaataacttcggcaatatcggttgccataatcgctaattctgtcaaaatccacaagacaatgcccaacggtttactcgtccgtgcgcgaattgcctgtgctaagtccatctgagttacaatgcctagtttagccgccatatattgtaataacatcgcgattaaactagacaccaaaatcacggacattaacaggtattgaaaactctgaccaccagtaatcgatgttgaccaattccctggatccatataacccactgccaccaatgcacccggtcctgaatacgctagtaacatcttccaaaagcctttgccctctggtacttcgaccgtcccattaatttcttcaagtgatgggccgttcgcatattcaatcagcttgtgcttcttgcccttttcttgttgattcattatcctcactccttattttgatcttgataacagttttattgtacgccgttttaatgaaatgtaaataaaaagttaggcaatgctaatttattttattcaaatcgataacaaatttattaatacaagctacaaaaaaagcgccgtcgaaattattctcgacggcgctttacatactgctttaatcatccgtttctttttcaattagcgcgccagtttcagcgtctaatttaacttgcattttttgctgtttttgatgaccttctacttcccagactgttcggccatcatctttttccaatgaccatttgatcacgttcccggtgaagtattgttgcgctttttgaagagcttgttgaggcgtcaacaattggtcaaacgctaattgcttttggtgtcgctcgacgccattttgttcatcggcatcaagggcttctttcgacaatcgactggttgcgccagttcgagcatccacatgcatgtgaagctcttcattgtcgttcattcccgttaattcataaaacatttggttaccccattgcttcagctcaacctcggttaaatctgatgcaggatattgttttgcgtacaattcacgggctttttcaagcgtcactttcggagcttgaaccgtttgttgcggactagtcgattctttttgagcggggggtgctgaatgttttgtttggttggctgtacaacccgtcaataggccgagcattactaaactaacaatgattgttgttttgcgcatcctgttctccctcgctttgttttgatacttaaggataccattcaacagggtaaattaaaaagcaatatcccttcctagagcaatgttgtccccactttgaccaataaaccaagcccatacacgatgatgatgatggcactcactaagttgacgcccatcaagaattttggtgaaacttttttccggaaaaggctaaagataatggcgataccaaagaaccaggtcgcggttgccgaaacaacccccacgatgaatggaatcgcctcgctactcgtcataccaccccgcaatgcgcccagcattaatgtcccatcaatcaaggcttgcggattaccccaaaccgccacaaatgcagtcaaaataaccttccccagtggcattggttctaacgcgccaaacgtaacggtactgcgggcacttttcaaaatggtgtatccaatccataaaatcaaaagtccaccgattcccataatggctaaccgaaccgcatcgttttgcacaatcagtgcgccaatcccataaaacgccacgagtgaaaagagcgcatcaaataaccagatgaacaaactgttgaaaactgcccgccgtgttgtattcgacatggcattattaaaaacgaaaatattttgcatcccgattggtgcgacaaacgcaaatcccatcaagattccttttaaaaagaacatctattaacctccttggcaagttaccttttagcgtaacatatctaggctaaactttcttgtctggatttaattgtaaaattagcatcgtcatcaacaagaataatgctgataaaatcaacgtccgttctcctaagaatgaaacacatagtccgaccatcactgcaccaatcgtaaaactgataatgatgcgtaaaatttgccagcccttatcggctgccttacgatcatgtttaaaaacagcgtcataaaaactttccgccatcgtccgtacatttccagtcatcatcaatgatgtaaatgggccaccatccaattcacgaaattcctgtaattgcgcagccgcaatgattgaaacaagtgaacttgcaacaatatccggtacatacggtgaaattcccgcaacaatcgttaagaccaagacttcaatccccaagataatccgttgtcgtttgttaatcgattcgtctttttcaaaccgatgttgtaaaatgcgcgttaagattgttcccaacataaaggcgagaatcggggtaatgtgccgtaataatacggaccatttcatctgccccaaatgggttcctaataaaattagattccccgtttgtaatccggcgaagacttccccgtgcaccaaataagtgtaagaatcaaagccccccgcagctgccagtagcccgccatataataatttgtcgctcattgtcattttgttccgcattaattcatcctactcctcaactaaactataagtattaactctatcggaaaaaccactcgccgtctacaagtagttatcatttaaaacgttatcaaaaaaaggcctcagcaaactgattttgctaaggcctttttggcttaattttctacgtcaccattgaaaccggctaattgacttgaataaattgataaacgcgtcgcataactaggatggtcattattttccttgaccacttctttaagcgtcggcaaattacaagtttaatccgaacaagcccggaatctttcaatggcagtctgttgatgatgtatttttaatggtcgttgattaattagttcaagtgctgataggatctcatcagtcattacttggctaaaattggtctttttcgggaagaaccagcgtaaccgtctattaaaatattcattggagccttgctcccatggtgaatatggatggcaaaaataaactttgatctgataatcctgttctaaggcctgataattggcaaactctttaccatgatcaacagtaatggattttacttggggaccgaaggcccccataaacttgccaaaggcggtgtttagagccttagccgttctattaggggctttgatggcccatagaagtcgggtcttacgttctacgaatgtaaccagacatgatcgtgactcacttcgactagaaagcaccgtatctacttcccaatgaccaaaagctaaccgttgattaacagttgttggccgttgttcgatggaagtcccacttgtaaatttcccacgattttcgctcactcggtgctggcggacattccgattgggtagatcagtcaatttgaaggggagccagccacgattaagccaattataaattgacgcagtgctcaagttataagcggccgcaatggtttctggtgaccaggttaatcgtaagtgattggtaattaaagtcgctaatgctgccgtcagcatcgaacgacgaccgcaattccgccttttgcgatctgcatcttgctgagctaattctagatataaggtttaactcggtccaactcatagctaatcgtagctttggcgacgcctaaggcgtcagccattacttggtaagatttattcccctcattgaccagttgtgctagtgcgccacgttgaaaacgtgataaagtagatgtacccaaagtaatcactccctatattggttggaattagctactaccattgtaagtgattgctttgggctttttaatttctgttcggattaattatagaatttgcctttataaaattgattttatttcataaaaaaaggcccgcatctaggatgcgggccttcaatcattaatgtctagttatggatataagtaaatgccccggcatttgaaattgtttgggtgttaggaccagcagggttgctgaagcccatcccaccttgagtgatgataattgtcccagctgcggcatcgtatgattgaacgtaagcaacgtgaccatatgtcccatctgcggcccaagaacctaccatttggccaccagcaaagctaacgattgcgcctgctgctggtatatggttaactgtgaagccagctgctgcggctgaagcaccccattgagcgccattcccccagttattgccagcccaaggtgctactgacttaacataccatgtacattgaccccatgcatatgaattcccagctgaattaccagcaacttttccgctgccaccgaaaacagatgtgccacccttattatctgatggcgtgtcaattgatgtaggttgaggtgtgtcttttttagcattgttggcattgttggcatcgtctgcagcctttttagcagcagcgtctgcttcttcagtacttgctttgtcgaaatctgcttgtaaagctgttaattcgtctttgttatcattgattttttgtgataaagctgtttgtttttgatcagcttcactcttcaatgattctaagtttgctttttgtttttctaaatcagtcttagtagcaactaaacttgctttagtattttcttgttctgtcttcaagccgcttaattttaccttagcgctgttaacatcatctaaagcttctttacttgcttggtttaatttattaattgtgaatgaacgcgaaactaaatctgaaaggtcatttgagtttaaaaggaagtcaacatatacgttcccgctgacagcatccccactcttttcttgtaaggtcactaattgtttcttcaatacgactgttcgtttagaaacttctttttgagcatccgtaatttgacctgaaagagattcgatttgattatttgctttagtaattgctgcttcttgatcagcaatttttgaagcgtttgttgaaatcttttgatccaacccaatcacttctgtattagctgattcgatttgtttgagcaaatcgtttgttgcgttcttattagcagtaatcgcttcttgtgcttcacttgaagttgcagcagatactacgtttgttgaaagaactgaagctgttaataatccaagagcaattgtagtcgtaatcgtttttttaaatgacatggtttattttctcctattagttaagcccgaactctgagactaagtatatagggcgaatgttacattaacattacataaacattatgcttacttaacaaatcataaaatataggctttgtaagcgccttttacgactttagaagccgatttcagagaaccctttcttattatttccttcgagaattaattatattcttatttttggcgtacttaacgaatcgaagctttattttttgttgtaaatgcaacaaaaatattttatactatttttatcgaaatgaggtatgccatcatgactgaaattctccgcccaatcggggttatagcccgcgcgttggaatccattgctaatattgaattccaacaatatgatttaacccgcgggcaatacctttacttagtccgcattgcagaacagcctgggatcattcaagaacgtctaggtgaattattaaaagtcgaccgcgcaacagtcacgcgcgccgttcaacaattaattaagcatggtttagttgaacgataccctgacaaaaccaatcgtaagatcaaacatctctatctcaccgaggccggtcgagccgtctatcccgccatcaaagctgaaaacgattattcaaatcaaatggcactgactggactgacgaccgacgaggcccataatcttgaagcactcctaaacaaagttagtgccaacgttgccgcaaactgggattttgtcaaaaagggacacgtccgacactattacaacaaaggaggcatcacaatgccaattcaagctgtcacattaaaccaactacctgacttacaatccatcagccgtgaaactttcacagcaacttttggcgctgaaaatgcagcagaagatctcgctaactacttagaagaagcttataatacagaccgattaactagcgagctcgagaatcccgattcgttcttctattttatttatcaagatggcgaagtcgctggttatttaaagctcaacattgatggcgcacaaactgaaaaagctgccccgcattcactggagattgaacgtatctatattcgacagtcctttaagcgacttggtttgggaacacaactaattaaccatgcactagccgtggcgcaacaattccataaaactaacgtatggctcggcgtgtgggaacacaacactgctgcacttaacttttacaaaaacctcggcttcagccaagttggtgatcacatcttccaacttggaagcgacgcacaacgtgatctgattatgcaaaaaacattaaccgtttaaacacacaaaaagaggcaacctatcaggttgcctcttttttcgattattgatgcgcacgttcatattctgtatcacagtcagctgtaaaaatggattctgttccggcttcaagtgcctttgtgtaataccattctttatgatctagcttcgtcaattctgcttgcagtgattcaatctcgttagccaacatttgccgccgttgttgaatcaacgccaagcgttggtccaaagtttcatcacctgcagttcgccaatcgatgtattgcttaatatcttttaactgcatacccttttttttcaaacattcaatatcacataaacagtctaaatcagcttgccggaattcacgccgaccagccggactgcgtttaataaacggtaataatccttgttcttcataataccgtagtgtcggaatactcaaatcatattgttgggcgactacgccaattgataatgccatattaaccttccttatacttgcttaaaaatcaacgtcatctggcaccatgcattgaccgcctaagttttccaaagcactaatttgggtcatttcactatctgttaattcaaaatcgaagatatcggtattttgcgccattcgttcttgatgagttgatttaggtaatggtaacacaccttgttgaatcccccaacgaaggcaaacttgcgctgccgttttgccgtgcttcgtcgcaattgttgcaatcgtttcattcgaaagcgcactggcttcaccaagtggtgcccaagcttcgactaagatgtcatgcgcttgattataacgcacagcttctgcttgtggccagcccggatggacttcgatttgatcaaccattggtttgataacggcggttttcatgagtgcatctaaatgatggggcataaagttcgacacaccaattgcacggatcttcccttcgttatatagatcttccattgcacgccaagtttcagcatttaattcagcatctttggcttcaaattgtttagtgttagctggccaatgaattaaatataaatctaaatagtcaacacctaacgttgcaattgtttgtgtaaaggcagctttcgtagcatcctagccccgttctgtattccatagcttacttgtcacaaagatgtcttcacgcgcgatatcactttctttcaaagcggcaccaacaccttgttcgttgccgtaaacggtagctgtatcaatgtgccgatagccaactgataaagcttctaagaccgctttttttgtttcttcatttggtgtttgatatgtcccataccctaatcctggaatggtaacaccgttgcttaaggtcattggggctgttaaggcagataatttttgcatttaaaagtctcctttttctaatcaataagactactttacaacctcaagctgacttgaggtcaaccatcatttgggggcctatcactttttttaaatccgttagtgcttccctaggaattatgcctgactaataagagccttaaactaaacttaactattctgatttttagcggcctaatcccatcaataatcgtatcatgaccactgacaattcctatgtaagggttttatcttcctattttaggaattcgcggtataatatagatatcaaaagtagttaatggaagggagcgagaaacatgaaaaaatttctattaggcagccttatttttgtaggtgttacagcaaccggtgcttgtttattagctaagaaaatggaactttttagagacgattctgtggattacgaaaaattcgaaagccgttagtcactcgtcatttctaaactgaatctaggaggtttttcatatgattaagaaaaaagcaattatgattggcgctggcctttctaacatggccgcagcagtctatttaattcaagaaggcggttggtctggcgatgcgattacattctattcattagatgaccatggttcaaacgatggggcatcagtttccgaaacaaccgatgaatattggaataaaaaccatcctctcgaaaatactaagggctacgttgcacgtggtgggcggatgcttaactatcggacttatgtcgatttaatggatcttctaggtcggattccttcagcaactgaacccaatatgacggctgaagaagatacccgttcattcgatgctcaacaccgcacattcgacaaagcacgtttattagaaggtagtaaaggtattttggatgctggtcatctcggctttaataataaggatcggttattaatgaccaaattgattatgatgcccgattctgaagaagaaaaattagacaacgtttcaattgccgaatacttcaaggacgatccacatatgttccaaacaaacttctggtacatgtgggaaaccacctttgctttcagaacccaaagttccgcacaagaattacgccgttacatgcaccaaatgatttatgaattcactcagattgaacacttagtcggtgttaaccggacacgttacaatcagtacgaaagtatcatgctgccgctgattaactacttaaaagcgcaaggttgtcacattatcctcaatcgacggattactgacttagactttaaagagactcagatgaccgatgaaattacggttactggtatgacaatgactaatactgagacagatgaagttgaacacgttacggtggacgacgacacagcggtcatcttcacaaacgggtcaattaccgattccgcaacacttggcgattataatacaccagcagctgaaaacatggattatggtgctgctgccggtctgtggaaacaagtcgcttctaaattctataatcttggcaatcccgataaattcttcgctgaccgcaatgccagtgagtgggtcagcttcactttaacgactaagaatcatattttgttaaacgaaatcgaacggattacaacgcaaattcctgggaatgctttgaattcgttcctatcaacgaaaccaatcacaccacttggtcaaaaagatgtgaatatgtcgattgttgttcaccatcaaccacacttcacaacgcaaaaaccaaacgaagcggttatctggggttacttcctctacccacgtcgtaacggtgaatttgtggataaaccttacatcgaaatgacgggtaaggaaatgcttcaagaattaattggccaactatcaaaagttgatcctggcccaatcaatattcgtgaaaaagaagctgaaattatggacagtgtcatcaataacattcctgtctatatgccatatgcttcagcactctttaataatcgtgccaaaactgaccgtccagaagtcatccccgaacattcaaccaacttagccttcactggtgaattcgttgaacaaccttatcagatgattttcactgaacaaagtgctgttcgttctggcgaaattgcagcttatcacttcgctggcattccaatggccaagttagtcgatacaccacgttatgatcgtgacatcaagacattgatgcgcgcaactaagaaaatgtttgcttaatccaaaaaagcgcggtagatttttacaaatctaccgcgcttttttctttaattaagcttttttatttcgtttgaccaagctaattacccctattaatgtcactaacagactccaaaacgcaggcacaactaatgtatttgaggcacttatttagctattcttcgagcggcgttgtcgaacccgcatgacaatcccaccaacaacgcccccactaataacgccaattgcgccccattgacttgagagtagtgccaatccaacaattaacagaacaattaatccaccgaatacatacatcataatcgacttctgtgatataccttgaattcctaactgttgttgacggttacgaaccgtcaacatcatgtagagattagctacttcgattagcaaaatcaccattactaaaaacggatcagttttcaggaatggtaattgataaaagcgacccattaaaatcactaaaataaagccatcaattaataacgaaccccaatagaagggctttagcttttgcaactcgagtttccgttccttggaattgttggagttgcaataactgtgcttgattaatttcggtatacaaaacgcctgcaatcgattgattgatatagccagcattaatcctttgttgaacaaaatcatattcgtgttggaaagcttgtacatatcgaagaaaaagcccctgacaaaagtcaggggctttttgattatactttaaaaataaattgatcaaatgcttgggcgatcccgtccgaatcgttatcagcagtaataaagtcaacgtgcgcctttgcttcagctgaaccgttgcccattgccaccgcagtaccggcaaattggaacattgggatgtcatttttctcatcgccaatcgccatgatttcatccggcgcgaatccaagtttattcgcgaggtattgcactgctttgcctttattaacatcagcgtgcatcacttctaaaaagaggtcagccgcacgaacaacataattatcagttccaaattgcgcgtgtacctgtggttcatgtacatctaactgttcgctggtccctgtaaagaccgctttgaccatctgcgtggccgcgtcgatttcattcggtttgcgaatatgaataccagcttcgttttcccaagcttgcaccaccgtcattggtgcaacattcacattactcgtataaatcacactattttgatcgagcacattatacggtaagcccgttgcttgcgagtagtcatcaatcgcttggtaggtttctcggctgatgccagcttctttcaagattttaccagacgccgtttcgataatactgccattaaacgtaatcacgtattgattatcaccggcaatccctagttgatttaaaaagggcaccacgccagctaatgggcgtccggaacacaaaacgactttcacaccctgttccagggccttagcaacttgttgtttcgtactggctagcagttggtgctgtgaactcaataatgtatcatcaatatcaatcgcgactaatttaatcgtcatctcaaaacccctcaaattgaatttaacttgcacaacgttcgactacatatgtttggcaattgtttcattaaccgctgctttttgatcttcaatcaatgcaacccgactttcgatgactttaatgtccatcgtaatttcccgggttaagcctggggtgttgagtttaggttcaaagaaggctttgaactctgccaaccgttctggggtcttaaagattgcggcaatcgaggtgatatacgttgtaaattccatatcaccgccgactgtctcttctagccattgccaatcgttgcgaatccaatcccaggttgcttgttggctcttgtcgttggcgagtaatccgcggaaccaagcccgcaaatcttgtggtttgatggtgctggcatcttcaaattttccaattaaggtcgcaattaattcaggatcagtcgtgcgcgttaaggccgcagtcaaatcattcttatagctcgcatcactcgtttggcgataagctgctaagagctgatcataaagtgcggcattcccgaagttttggacctcattcatcaagaccagtacccgaattgcggctggtaaggtgaccagtttttcttggttcgcttggaataaagtatgggctacatcaatggctgcttggtttttagcatacaaggctgcgcttaaaacagttgggcgcattaactgatcgtcattgctatcagtcggttgaaccagccaacctaagcgtgcaacttgcgctttactcaattggtcgaagaatcgacgtaggtgttgttcactttcttcaccaggtgtcacaaatttcttcaagttaccagcaaccgtgtaaagggcatctgccacgacatttgaatcactcttggcaaaaggtgctaaaacaggcacaacatctgcgtacgaaatttgacgtccttcagctaataagcgtaagtcttgcagtagttgcagttgtccaattggtgccatgtcagcactactatttaaaatatcatctaataatgtttgatcgtaatgaacaatgaaatgcgattcgttccccacgtttaagcggaatggttgcccattgtcggcgcgtaattgagcataatcaccgagtaccaattcacggtcagtcatcaataatggggctgccgcatagttgctcttcaatggaatctgccattgacgcccaacttcttgaccctcaccgataaagaattgttgttggttaagcgttaattgtccgtcaacgactttggccgttaccactggataacctggttgttcgagccatgaatgcataatggccccaacatctaagttagcggctttccccagtgctgcccacaagtcagcgccagtcgcatttccgaattgatgtgctgcaaaataagctttcaaaccagcgcgtagagcatcgtcaccgattaaagcgcgaaccatcacgagcatccgggcgcctttggcatacacgattgcgccatcaaataacgcatcgatttcggctggattattgacttgcacatgcaccgattggaccccatcagtcgcgtcacgttgtaaggctgccgctgcttccgaggtttggaaactttcccaaatatgccagtccggctgcaacgcatcgattgcgacgtattccatcatattggcaaaactttcgttcaaccaaagatcgtcccaccattgcatcgttactaaatcaccaaaccattggtgtgctaattcatgcgcaatcacagtcgcaacgcggtgtttcgtatccaaggcagtattatcaggatcgagtaataaataagcttcccgataagtgactaagccccagttttccatcgcgccggccgaaaagtctggcaatgccaactgccatgaatggggtaatggatagggtgtttggtagaagtcttcaaagaattcgattgaccgtttagcaatgtccaatgcaaaatcgagctcgtttgcttgatgtgccttagtagcaaagacgccaacttgcacgccgctctccgttttggtttgaaccccttgcaattcaccaaaagcaaaggccacaaggtacgttgacatccggaccgttgtttcaaagtggtgaacgccatcgatgacttctttttcaggcatgttgctcagaatcgtttcgccttcgtgctcatcgaatttaatcgctaaatcaaaagtcgctttggcttctggttcatcaatacatgggaaagcttgccgcgcaaaattggtttcaaattgcgtgccgattaattctttttgcaccccatcgacttgataataagaaggatagatgcccatcattgaatccgttaaagcggcagtataggcaattaccaaagtcacttcgccaggttggccgacttcgactttcaaggcatttgcgtcattatcaactgtaaacggcacactcttacctgcagccgtcactgtttcaatcactaaaccgttctgatgaattaaaacaagtgcttctttagcagtccccgtaattgtcgtccgaccactaaattgtttttgagcccgattaatatctagaaaaacttgataatgttccggttgaaagctttgataaaaacgcatcaattctgccatattatgatctccaatttcatttagaatactgtcattatacgacttttagcctaaaaaagctgttgtcatccatttcatattttgattatcagcttggttgcacttaattaaaaaaatcaccttatgaagtgaacccccgatattggaccaaatattctaaaacattaaaaataaaagttgttcaggattatctaacgtcacccttaggttataaattaatagcgagaaaatatggtattaagaataactcactagttgtctcgtgggttcaacgttataaggcctttggcccaaaaagactggatgtcctatcacccaaaaaaacatttgatggctcatttaagatgaatgttttaaaatggatgaaaacgaataaggcttcttatccgaaaaccgcacttcattttaatatctcaaacgtcgggaccatctggcaatggcaacatatttgggagactgagggtgctgatgctttatatcgttccaaaggacggcaaacaattatgtcagctgataaacaatcaaaaaaacggcaacaaacagagttagaacgtcttagagaagaaaatgaattactacaaatcgagaatgaatacctaaaaaaattaagagccttagtccaggaagaagaaaacaacaagcgcaagtcatccaagagctaaggcttaaacacaaactagtaaaaattctaaaaatagttggtatggccaaaagtacgtatgaatacattattagtcatgaaccgaacggttcatctgaccaatctgttaaacaaaccatccaaataatcaagaaaaatcatccagcgtacggttatcgtcgtgtaactggtgaattacatcgtatgaatatcttagtaaatcataaaaaagtacttgtcttaatgcgagaactgcaattactatcaactgcatttaacaaacgtactcgtaaatataattcatatagaggcaatgttggcaccgttgctaagaacttaatcaaccgtcgtttcttcactgatcgtccttatcaaaaactagtaacagacgttactgaagttcgctagggaaccaaggcaattgatgaacgcgcctatttcacatgtatttatgatttattctcaggtgaaattctcagccatcaagttagtaaacaccctactgttgaatttactacaactgttttgaatcgagcagttaagaaaatccctaagaatttaaaataccggacaacagtccactcagatcaaggatttcaataccagcatcaagattggactcatatcttgaaaaaacatcgcatttttcaaagtatgtctcgcaaagcaacatgtttagataatgcagcaatggagagctttttccatattatgaaagccgaagctttctaccaaaaagaaaccgatacttatgaaacgctagtttcacaaatatcggtttggattgatgattataatttttcaagaattaaaacaaaactgggttgtaaaagtccgattgaatatcgaatttttacaacccagaaagctacttaaagtttcgtccaatatttggggttcacttcattaatcttaaaaacagattaaggtgatttttttatgctcagttactaaataccattttgaaacgcgctcgtcgaagcaatgccttacgtttagctacatcagtcaaaccactgactgcatcagttattcgcctgcttaggctaatccgcacgcactacccgcttagtcgcccacttttcttaaacttgttgtttagctgggcgaattaagacttcactaaccactacatgttttggttggtcaatcgcatataagactgcgttggcaatgtcttctggattgagggccaacgctgattcttctggtgcatccattaattgcttaaccccttcgaaaacagcagggttgccaatcgtattcaccaattctgttttaacagcccctggtgaaacaattgttgaacgaatgccgttatctttttcttcttggcgtaagccttccataatagcgcgcactgcatatttagtcccgttataaacggcagaagctggataaaccacatgtccggcaaccgaatcagttgaaataatcaaaccatcttgttgggcttgcatcgttggtaagaccgcaccgatcccgtttaaaacgcccatgatgttgatatcgagcatcttttgccattgatcataatcgcgttcgctcaggtttccttgtggcatgacgccggcattgttgtataaaacatctacgcgaccgaaatgatcaagcgccaattggactaagctcgccatttgatcccgattagtcacatccgttgcttgataaatcgcatttgcaccgatttctgatgctaaagcttgtaaacgatcttcacgacgagctgctaaaacaaccttagcccctttgcttgctaataatttggcagttgctgccctaatccctgatgaggcacctgtaatgatcacgactttattttgaattgacatgttaaaactccttttctaatttgatttgacgcatgactttcgctggcgttccggcaacaatcatattgtctggtacatctttggtgaccgtggcgttagcagcgacaatcgcattctcaccgaccgtcacccccggtaaaatcgttgcgccggcaccaatccatgcgttctgtttgatatgcacgggtttaacgaataaaccgcgccggtcaggcttttttaacccacttgatttgcgaaattgcttaatttatgtccgttgctttcccaaaataggggctctataatgcatattgaatcttatctggagatcttttgatgatggaaaaaactgaaaaaatcgcaattttagaaaaactggtctcaattgatacaacagaccaagcagaaggtgtgattgccgactacttagccgatctattcgcacaacatggtatccatactgaaaaagtggcttctaaaccaggccgcgaaaacttagtggcctatctaggcgaagcaaccgacaaagtcctcggtgtcactggtcatatggacgtcgtcagcatcggtgatcgcagcaaatggacgagtaatcccttcactctaaccgctcgcgatggtaaactcttcggtcgaggcgcaaccgacatgaagtctggtctggctgcgcttgtgattgcaatgatcgaattacacgatgaacatgttcctttaaacgaccaaatcaaactactcgcaaccgtcgatgaagaaaagaacgaaactggtgcgcaaactttaaccgctcaaggctatgccgatgatttaacagccttattagttgccgaaccatctggcgttgataaacaagccttggcaaataaccccgataaattccccacagaaatggcccaaaaactccttgcggctaatcaaaccaatgaacaacatttcttaattttcgcccataacggttcccttgattttaaagtgacggcaactggtaaaaccgcgcacagttcaatgcccgcactcggtattaacgcaattgatcatttgcttgcctactacaatcggcaaaaacaatacttcgatcagaaacatcctattgatgatgtcctcggcgatatcgtgcctgtcacaaccttaatcaacggtggtgaacaaattaattcggtccccggtcacacagaacttacttgtcgggttcgtacaacccccgccttaactggcgaccaagtgattgctgacctcaataccatcattgcggaactcaatcaacaggtagacatgaatctggaattgaccgtcattaataaccaaccacccgttaagagcaatccacaagcaccattcattcaagctgttcaaaaaatcggggcacaaaagttatcccaagcttatccactgatgcacgttgctggcggtaccgacgccgcccaccttgctaagcacaatcctgacttacctgtggcagttgtcggccccggcaatgatactagccacatgattgacgaatatgttgatgaagaaatgtacctcaaacacatcgacttctttaaagccgttatgctggattacttaaaataacaacacaaaaaaacatcacctaatatatgccctacttaagagcttatcggatgatgttattatttaatcgtgatacgccttcaagctatttttaagctaaggcagtattgatttcttgtgctaatgtttctttccgttgtaacccaaccatttgttgcactaattggccatctttcatgaccaacaaggttggaattgattggatgccgaattcagccgccaagttttggttgtgatcaacgtcaactttggcgattttagctttacccgcgtaatcgtcggctagttcttcgacaattgggccttgcatccgacatggtgggcaccatgttgcccagaaatcgactaatgtgaccccttcttgaacttcatctttaaagtttgcttcagttagaatttgtgttgccattgcgatcacctttcttttcaagaaaatcattcaacgatttcattgaattactcataatataccaccattgggacgtgccgtcaaaaaggacgcttcatcttattccgtttcggtcataactcgcgaccattcccacactgattgattaaacgttgccactttaaacccagcagcttgtagttgttgactggcaacattggcgtaagcacatagacgaccacgacaataaaccaccacttctttatccttggggagctcagctaatcgttgatccaactgatcatacggcacattgcgtgcccctggtaagtgttgacttgcaaactcatctgcgggacgcaaatcaatcaaacacacatcgtctgccattaatttcgttttcaatgcgtcaccagttaacgcttcgggggcacctgtttcttgcgcgagtgttttttccaaaatcgtcatctctggcaaagtttcttcgcagacatcaaccaagagggttaccaattgtttgacccgttctgaatttaaacgataagtaacaaaattcttctcgcgttcaatcgccactaagtttgtttgtttcaaaatttgcaggttccgtgaaacggtagcgacacttaagccgactgtactggctaagacttccaccgttttggggccttgcgcaagaatgttcaacagttgtagacgcgtcacgttccctaacgacttcccgactttgaccacctgctcataaaccgcatcccggtattctgtaatgcgttcatccactttcatcgcctcccaacaatcaacgcctttattgaatagaatcaatttaacatttctagacaagtgggtcaactaaacaagctaggcaattaaagtaagacacctcagttaattgctttcttcaaatcaacggtgccctgattagcttctttatctgtaatttcaaaaattagtataaattgccactcttgaccgactttatcagttacgttcatttcagtatatttccctatctgaattcctaattaaatgaactaatgtctaaaataaaaaaagaaccaccactcaagctatgtactagggtcctgtcaagttgccggatgaaataatataaaattggtagattgcaaatttaatccgaattttcggacaaatttgtcagcataacctgatacggtgtttgccagtcgagtattttaagcggtcgctggttaatttggagtaacgtcgtcgttaaatcttgagcactaatgtgctcaaaacgagtccctttaggataaaaataacgtaaattccgattaaagcgttcattactaccacgttcagctggcgtataagcatggcagtaataggtcttaataccatattgtgattcaagtgatactagtccactaaactcagtgccacggtccacagtaaagctgtgcaccggaccattaaaagtggttaggaacttagttagtgcttcattaacagtcgctgtcgtccgatcttttaaccggtatgcccaaaggaaccgtgatttgcgatcgattaaagttaataaaactgccttactatgcccacgaggaccaacgactgtatctagttcaaaatcgccgatgcgcttacgttgattaatcatcatgggacgctgttcaattgatcgccccaaagattgattatatttggatcgttggtcaacgttacgccgttggcgtacgccatgttcaggtagatcattcaaggagaaaccaattctcccctgatttagccaattataaatagatttagtagctagtttaaattcgtgagcaatcattcctggtgaccagcttagacgtaaatggttgagaattttttgctttaactcatcgctcagcttagttttccgaccacatcgtgatcgcttgtattcggcatctgtttgtgctaattcagcctgataaggttgacatcgagataattcataagaaattgttgacggtgatcggttcagccgaacgcccatttggatattggacagccctagttcacaaaaggtttcgattttaattcgttcggaataggttatactagacaaaagatcagctcctaaaagatgggtttgtggtaaacaccattttaaaggaagctgatcttttttgtccgaacagcgttcggattaattttacaatctaccataattaattttttattttcactataaaatgccaaccatctgaccattatcgactattacaatcatcactagcagacatcaaattaatcgtttacaaattaataatataaagtagtatttcacattcttatattttataataaggataagaaattatttttataggaggagtagcatgccatctagacaaccgtcgtattcagccggtaaaattaatgcacgccgtcgtaatccggatttaccaactggcgatgtccaccacgacgccaataactggtttcaaagttcagccgttgaacagcatcccgtcacttttaagaatatctatgaaatgcaagtaactgctaacgtctttcttcccaaagactcgacggaaactgtttttccagcactaatcatcggtgctcccatcggtgccgttaaagaacaggcagctaacctatatgccattaagctcgctgaacaagggtttgtaaccgtttcatttgatcaatctgcttggggcgggagtaacggtgctctgcgcaacgcgattgcccctatcttatatgcggagaatttctcagcagccactgactacctaaccactctagactgtgtcgccaatgaccgtattggcttaatcgcaattggttcggccggtggtttcgcgctcaacgcactcaaaatagacgcacgtattaaagcacttgcaactattaacttaaccgatatgggtgccattgttcgcgaacagcgtgatgcactaggcggcaacgcattaatcgaggaatcctcacgatcccggacattagagattgcaggtcaagcaaccacttacgcccatggagtacctgaagaactggacgaaaactcaactgatatcgaacgtgaattctacgacttttatcgtacccaacgtggcgcagccaactcgacactccatcccactcgtacaacttttactaaactattagatttctatccattgcgcgacctcgaaacgatcacagaacgtgccatgctctttgttgttggtgaagaggcatggtcacgacatttcagtgaagccgcctttgccagtgctaacgaatcaaaacagttattaaccgtaaaagcagctgggcatgtcgatttatatgatcgtatcgcgcttattcctttttcagaattaactcaatttttcaccaaaaatctataacaacgcaaaaaaataccactgacagcgaattgtcagcggtatttttatattatttatcattcaagtaggctttgactacctgataatttttgaagcccccactcaagttatacacggatttaaaaccgaggttcagaagtaaattctgagcagcattagccgtaacccctttattgcaataggtgacagttggaatatccatatctaattccgtgaaccgatcacgaatttcagcaagcggcatgttaatggcatgttcaacatgctcgtccgcatatttttgcttcgaacgtacgtccaaaatctggaagcgttcaccttcagccaagcgttgctccaattcagctggaggcaagagcggccgcccatgcaatgcattatcgagcgccattcccgtatagagcactggatccttagtggttgcatagagtggttgataagctagatcgagatggaataaatcggccaccttcgcacccaatgtgatggcagtcacgaaaacgtcaatccgcttatcaaccccatctttaccaatgatttgtacacctaataattttcccgtttgacggccagcaatggctttaatgacgttttcggttccatttaagtaatctgcatgccctggtttaatgttgtagagtacttccacatcatagtccttagctcgcgcgactgcttcagtaaacccagtctgtgcaatcgttgtatcgaacaaccgaacaatccccgttccaagaatcccgcggtgcgttaagccaccgccagtcaatgaattgccggcaattcgtcccattttattggcagtcgaacccattggtcgatacagtggtgagccatcaattacggagaaactctcaacaacatcgccgaccgcgtaaatattcggtacagtcgtcaacatttgttggtcgaccttcaacgcccctgaaggtcccttagctatcttcatatggtcgaccaactgcgtttgtggttcaacgccaagtgctagtaggaccaaatccgtttgaatggtcgtctgattactcaattctaccgccgataccacaccatcctgcgcagtcacttgttttgcggttacactctttaacacatgcaccccgttagcacgaataacttgttcagcacgataggccatatcaccatcaaaatgggtcataatttgcgcgcttcgttgaactaacgtcacgtccaagccacgtttttgaaattgttccatcatttcaagcccaacataaccggtcccaaaaatcgtcacattttgaactgaatggtgctgtaaatacgcgtcgattgcgcgtgtatctaccatgttatgcatcgtgaagacgttttggtaggcttcatcgaacggtgcaataatgcgtggcgtggcccccgtcgctaaaactaggcggtcataataatcttcaaacaactcgcccgtctcaaagtttttcaagaccagcgcttgttggttttcatcgattgaaatcacttcgatacccgtcataatgtcaacgttgaagcgttttttgaaccacgccgcatcgcgcggaattaacgtctctaggtcttcaacctcaccccctacgtaataaggcatgccacaaaccgaataagagatatcctgacctttttcataaacgacaatctcatcaacttcactatttcgccgcgcctttgctgccacactcgtccccgctgcaacggagccaatcacaacaatcttcatgatcatcaccaatccttattatatttaaagacaatataactcattttaatcttgaatgaaatccatttgttttcgactcccaaattgcaagaacaaattagcgcgcattttagaatcaagttagccactgtctcaaaattttttggacaataaaaaacatcaagaacagatatcctgtatcattgaagttcctacacaaacaatggaagaggatattgtcttgatgcagaaacaggataccacacaccgccaaaaaggtcagcacttaacatcactcgagcgcggaaaagtggccggattccgccaagctgggaagtccaatcgttggattgctgctgaaattggcgtctgcccgcagaccattaataatgaaatcaagcgaggtacagtagatcaggtcaagaagagtaatggcaagcgcgtctaccatcgacaatacctgccagaggctgctcaggcacgttacgagactgcacgcttgagctgccatcgtcctgacaagttcgccagcgtacaggtcttcttagcctggtacgtacagcgagctaagcaggacaaatggtcgccggatgcttcaatcggctatgccaagcgacacaagctgtttactcctgaagagcttgtttgtgcctcgactttgtaccagtacattgacgaccaacgcctagagattcgaaatatcgacctgttggagaagactaagcggaagacctctcaccagcaccacaccaaggctaagcgcctggctggccgcagtatcgaggaacggcctaaggtcgttgaacgacgcaggcagttcggtcactgggagatggataccattgtcggtaaacgcaatggcaaggagagcgtcatcttgactctgattgagcgcaagacccgttgccaacttctccgcttgatcgaaggacgagatgcagactctgtgagctatgcattgcgtggaatcaagcgcgaatggggagcttgcatcaagaccatcacagccgacaacggacccgagttcaccgccttaaatactgcttttgctgggacggaaactgagatcttctacgcccatccttacacgtcctgcgaccgtggcaccaacgaggcacataaccggatgatccgccaggacttccctaagggcatgtccctagatgacattagccctagtcaagtgcaggccacgcaagaccgcttgaatcagttgcctcgcaaacaacagggctactgcacaccccagcaaaactttgaggccgaagctcggcgcgttcgccgcatggcccagtagtctctctagcgccacaacttctatttgataacggcctgttctgggattgtcctcaacgactggctaacttgttcttgcaatttacgaagaacaaattagccacacgataaatcctattaaatcagtattttcattaatattcatattttatggacttaacttaaccggcggaagcagcggagaaaagctctttgggtgtttgatagccagtttgccggcgcggtaaattgtttagctttgactcaactgcttggatatcatgaggacccaaaatatccatggatagacccttgggtacatcgcggcggatcattcgattatgcgcttcgttagtcccgcgctcagaggaacgatatggatgggcataataaaggtcagcgacaccggtaagtacagcgccaacttccgagaactcagcgccattatcggcagtaactgacttcatgattgatccgtattcttgacagatcttggccagctcatagttgactgaatcggcatcacgaccatctggatgtaagctgattcctgagacaacttttaagagagggtataatgaataaatcatctctcaaaaggaaggaatttttacatgccaactcgttacgacaaagaattcaaacaaaacattatcaacctatataagcaaggcgaatcagctgcccaactggccagagaatatggcattggctattcaacagttcataagtggatccagggccaggccaaaactcaatccggtaaatcgccagacgaaatcaaagcgatggaaaagcgactggcttcgctgtctgaggagaacgaaatcctaaaaaaagccctgggcttccttgcgcagaagtaaccaatatctttgattacattcaccaagaaagccatcaccaccaggtaaccaagatgtgccgaatcctccgagtttcaaaggtcgatgacagtgggctcgattagcttcgtacttagcttgtgctgtttctggtgagtatacagcgtaatattggcgttgaccattcactttttttacttggtcgatctcgccgcggcacaattcattattgattgtttgatgacaaacattaagcgctctggcaattgcacgattggaatagccttggctgtgcagcgtagcaattctgcctcgttcaaacgaagttaggtgctgacctttttttctgactgtggtattctgttcttgcatcaagacaataacctctttcattgtttgtgtaggaacatcaatgataacagagattcgtcttggtgttttttattttatcaattggcaaattctataattaatccgaacagaaattaaaaagcccaaagcaatcacttacaatggtagtaactaattccaaccaatatagggagtgattactttgggtacatctactttatcacgttttcaacgtggcgcactagcacaactggtcaatgaggggaataaatcttaccaagtaatggctgacgccttaggcgtcgccaaagctacgattagctatgagttggaccgagttaaaccttatgatccagaattagctcagcaagatgcagatcgcaaaaggcggaattgcggtcgtcgttcgatgctgacggcagcattagcgactttaattaccaatcacttacgattaacctggtcaccagaaaccattgcggccgcttataacttgagcactgcgtcaatttataattggcttaatcgtggctggctccccttcaaattgactgatctacccaatcggaatgtccgccagcaccgagtgagcgaaaatcgtgggaaatttacaagtgggacttccatcgaacaacggccaacaactgttaatcaacggttagcttttggtcattgggaagtagatacggtgctttctagtcgaagtgagtcacgatcatgtctggttacattcgtagaacgtaagacccgacttctatgggccatcaaagcccctaatagaacggctaaggctctaaacaccgcctttggtaagtttatgggggccttcggtccccaagtaaaatccattactgttgatcatggtaaagagtttgccaattatcaggccttagaacaggattatcagatcaaagtttatttttgccatccatattcaccatgggagcgaggttccaatgaatattttaatcgacggttacgctggttcttcccgaaaaagaccaattttagccaagtaacgactgatgagatcctagcagcacttgaactaattaatcaacgaccattaaaaatacatcatcaacagactgccattgaaagattccgggcttgttcggattaaacttgtaatttgccaattagctaaaagtatttggctaacttgattataaaacgcgcgatttttatttggaggttcttattatgtttaatggtctattcaaagatctaacaccaaggtcgtttactggtactgcgtcgagttattattagtatcgtgggtctctgtgtcttttcagctttctttattatctttggtgctaaagtaacttttgaaattcttgcaatatttgctcgagatacgactacatttgtcactgtgttgctttacttgctttcattatttatttttttaatcgggttcaaaaccaagattactcaaattagtgttgttacagcttggattagtgaagtacagtttttatttttgttattctcgccaatttggcaaattcacgctggaagagaagttgcgttctatgttattttggctatgaggattctggtcacagtattactggcatttcttttgtatctatatcatcgcaacaataaagcaaatcgaaaataccgtcgataacttaatacaaaaaaataggctagcccttgagggactagcctatttgaatatcatcaataaaaatcgcgttcaaattgcattaaatcattgattaaagacgctgcttgcttcaattcagcatctttatatttttcggtcaccttatcaataacttgcgctttcagcgtttcatgcattttatcgtggctttgcgcaatcacacggcctttagcggtcaaagaataatagatttttttctgatcatctggttttttagtcgcttgaattaagcccatttgaatcaacttcttagcggcgcgtgtaatgccgccacgcgtaaccgccaaccgatccgctagtgctacacctgttaattcttcggcctctaatcctgataatatgtgcaatgcaatgattgatagctgcggaatcatcgttttcaagttctcatcactcagctgattttgcaaccatttttgttcttgaacaccgcggccgttgacactatctgagcgtaattgcttgattgcatgatagagtgccatcactgattcgttttccatttgcttaacctctcatcaattgttaccaccagtatacaccaaattagaatactttagctttggtcgtcgcttccgttagggcccgtgctaatatttgttcacgttgatctgcatgagcatccgcgccttcaatatagacgtgttcaacttgattaacaccatagaatttcaacatattggttaaatacatatcgcctaaatccataagtgcagaactttcgttactcttaatcttaaataaacggcggaacaagaacttaacgatcccccacttgcccccagcgtgataaacactgccagctgcttggatatggattgctttcttaccttctaacaaacctactgaaccgttcggtgtgtatttgaatgttttgtgggcgaccgccgtcaaatctaaatattgtttcatctcagctggtaaaaaatgattgtacattggattgatgaagacatatttatcagcttcgataaattcatctaaccaatctgcgtgttgttgtaatagtgttttctcagcttcagccattggttcgtcaaatttttgtttacgccatgcagccattgtcatatcgttcaatggtggaacacccgcttcagtatatagatctcgaataataatttgatcatcaggatgggtccgacgataagtttctacaaagcgggtccctaccgctagggataaactcttttcaacatggggatgtgcttggattactaataatgtactcatttaaaaaaaccttctttagtttcgtttagttgcttgtcaacaaaataaagattatcatcgttttagttgcttgtcaacaaaatgttttaaattaccgttagctatcaaatttagctgaagtgccctagtagcgccctaacgtgtcatttttaagcaaaaaaaataggctatcccttgagggactagcctatttgtgtaagcttattaaacatgctttttaaagctgactcctgcgcttagctacaatccgcaaacaatcgactaacgtcgattattcacgaatttaggctaatgctcagaatcaacccgctttaaacacactctttaataattagtttaatttcttcttgcttactacgtttaagttttcgtctaaatcataaacaactggttcgcctgttgccatttcaacgtccatgatgtcttcatcagagatgttttcgatgtattttgttaaggcgcgtagtgagttaccgtgagcggctacaatgatattttggccgtcgattaattttggagcgatttcgtcttcccagaatgggataacacgttccaaagtaaccttcaagttttcgccaccaggaattgcttttggatctaagtgtgcgtaacgacggtcgtttgctgctgaaccttcatcacttgcatccaatagtggaggaagtgtgtcgtatgaacgacgccagatgtgaacttgttcgtcgccccatttttcagctgcttcagctttgttttgaccttgtaatgcaccataatgacgttcgtttaagcgccatgatttcatttctggaacccataattgatctgaaccttcaagtgcatagtgtaatgtcttgatggcacgagtcaatactgatgtgtaagcttggtcaaaaaggatgccttcttttttcaataaagcaccagcgttttgagcttggcgtacgccttcttcgcttaagttaacatcaacccaaccagtgaattggtttgataagttccattcactttgtccgtgacgaataaaaactaatttagccatgtgtaagtaacctcactttttttatttttactctgttcattttacactgtttgctacacaatttacagtcttatcttttcagaaaataatgaaccttctttttttatgctcgatcagtcgttttcgtttctttcaataagaaaagcgccgccaagatggcaatcaccatgagcactagcgacgtcgttacaacagcgatcatccctttatcaaaagccgtgacaacaatttgttggacctttgcggcatacggtgtcttcactaattgttgcccccacgcgattgcatgtcctgaaaaagcacctgcttcaaccaatgcttgctgaatgccagttgctgccgccttcgggattgagctaccactaaagccagtcttcaaactcgtttcgtaggcattcgtttgtgataaaccgagaatcacaacaccgacggtaattccaatttggcggaaaacattcaataaaccggatgccattccgatttcttgaggattaatattatccatcgccgctgtattgatcattggattgataatcgcattgcctaacccagttagcgcaagcaatggtaagagttgcatataagtaaaatcagtcgttgtcacttgtctaaaaattaataaaccaagggcagaaacagtaaatccaaaagcaatcaaccattttttaccgaatttatagcctagaacacccgtgaatggtcctaaaacaagggaccataaactcattggcagttgatgcacaccggttgaaaaggctgagtaacccatgtaattttgcatcaaactcgtttgataagcggctaaggcaaaaatgccagcgcctaatgagaaagctaaaatcacaacacccacgaaatggcgattcgtaagtaacgtcaagttcatcattggtgcttttgctttcaattccacaaagacgaaaagcgctaaaattaaaacggaagcgactaaccaccccataatgcgcatatctgtccaagcccagtgcatatgttgttctttttgaatcaacccataaatcccggaaaataaactaattgctgacaagatcatccccataaaatcgattgattcgcccgcgccataagctggtgtttctttaacattgcgaatcactaagtaaactgaaataatcccgactggtaaattgacgaaaaagatggatggccagccgaagttttcgactaaaaagccccctactaagggtccaatagcagttgaaaaaccaatcacggagcctaaaatccccagtgcagtcccccgttcgcgcccttcaaagttcgacgccactagtgccatcgataaactcatcatacccgagccaccaatcgcttggaccgcgcgcccgatatctaataccaataaatttggtgccagtccattaacgacagaggccgctgtgaataaaatcatactcatgataaaaattttcttgcgcccgaacatgtcccctaatttggaaacaatcaacaagctgaccgcgtacatcaacgtataagcgttcaaaacccattgtaagttgctaaaagttgttttaaaatcaatcgccatacttggtaaagcgacattgacgacagttacgtctagcaatcccataaagacacccagactcatcgcgaccagcgctatccagcggttggttgtttttttcattttactatctccattttctctatctcatttatttgtgcttgtagccaatccattttggctttgatcgttgtgattacgaaatcggttgaacgaatctgccaataataataatccgtcattgtctcatccgcatcttttaattcagttagatgtttttccacaccgctataaacatgtaaatcttcagccaactcactgtagaaatcttgtaaaatgctgacttgttctgctgcatcaatgtagtgcatcccacgcatcttaaagcgataagcatcatcccacttcgcatcatgaacgactggtttagccattaattcagcaaaatagcgccgtccctcttcagtaatgtgcgcaatcttcgtaccacgtgaatcctgatcagcttcctcaaacccaatgcagcctttgctttccaatttatctaacaacggatacaaaaccccatttgaaattttccgtctgggcaccatcgcattttccaagataatccgcaacttatagcccgacatattccggctcattaaggcggataacatcagcaattcatacataaacgcataacctctctctttaatcagtcttttagacaggtctttaagacttattaagtatagttctttccgacatatttacaagcctttttttcatttttagacaaataaaaaaacatgatccgcataagttgcctgataacaaggcttcatgcggatcacgcttttatggatttagggatgtataggttgtacactctctctttcaactaattcaattgaaagtactttttgttgtggcgcaatagcaggctccacaatccggttcaataatagacgtgttgcttcttgcccaagctcgaaaatcggttgcttaatggtcgtcaattttggtgtgacatattcacaccaatcgatgttatcatagccaatcactgagatatcttctggcacctgtactcgtaattcacgtaacccacgaatcaatccgatagcgagttcatcattgattgcaaatacagcagttaccccgctatcaatcacctgtcgtgcaacttggtaaccacctaatttcgttaacggtgtcgttatttgccactcatccgccactggtaattgggctttcaacatcgcggcttgataaccaatgaatcgttgttcgatgttccaagctcgttgttctggtaaaacaattccgactttatgatggcctcgttcaatgagataccgtgcggccaactctccaccttgcgtatcggcaaccgtaatttcatctcccgcatgttgtttatctgattgatctaataagataaacgggatttgtcgtttttgcagatagctatccaacgttgttttttgtaaatgagggacagccaaaataaagccgtcaacatttcgacgaaccaattcctttaaataatgatcaactttctgattatgcgcccctgcactataaattaatgggatgaaatcgaattgataggcaatttcttcgacaccttgaataaactgactaaaaaaaggattattgatatccggcaccaataccgcgatcgtcttcgtttctttattaatcatattttgcgcgaaataatcaggttcatactgaagtctttcccgagcggctttgacccgcgcaatcgtttctgcgctaaagcgctcacctttattattaagaattaacgaaactgttgtgaccgatgtttgcgccagcgcggcaacatctttaatcgttacttttcgaaccattttggcactcccccgaatcaaattaataaaaacacccacagccggctagccatggacgctgttaatatgattataactgaatatccttttcataaggaatcgaattttgcgcccctttagtttggactgcaatcgaagaagccttattggcataagtcattgctgcttcaatgttactgtaatccaattcaagtttcgtacttaaagcaccgataaaggtatcaccagcagcggttgtatcgactgcttgaactttaaatgccggtacaaacccggttgttgttggtgttgcatagaatgagccctttgccccaaccgtaatgataacgactttaatccccatcttaaacatcgcttccacgttagctttcattgatgcttcgtcagtcactttaatccctgtgataatttcagcttccgtttcattagggacaatcatgtccgtcactgccaataattcagctggaatatttttaatcgctggtgcagggttcaaaatcgtttgaacgccgtttgaacgggcaattttgaaagcttcaataattgcaggaataggtacttcgaattgagcgacaattctgtcagcatctttgatggcttcttcggcttcatgaatatcatcgactgtcacatcttggttggccccaccatagattaaaatactattttgtccactagcatccaccatgatgtaagcttggccagtcccagctgtttcagaacaacgaacgtgatcaatgttcatgccatcttttttgaacgtatctagcatgaaatcagcggcgccttccttaccaaccttactaatgaaagctgtttgcgcacctgaccgaacagctgcgattgcttggtttgcacccttaccaccaccagcaactgcgcggccatccattgctaatgtttcacctggttgtggaaaacgctgaacgtttaaaattgtgtcgacatttgttgaccctaatacgattacttttttcatttgaaagccctcctaatggttaaaatacaacgccactttctaaaataatgttggaataaggtgtcatttcacccgtgcgaacaaatgctttggcctgccccaagtcctgtttcatttgtgcgtgatcaataaattcaatgggcgtctcaccaatcacttttttgatttgttcaagttgtgctggattagctgttttaatttcgtttgctaagtaaactttttgaatttccaattctgttagaacatttttaagtacttgaataaaacttggtacaccattttcgatggccacatcgattttttgcgttccagctgggaccggcatcccagcatcgccaatactcattgtatcaaaatgtcccatgtttgaaatcacatttgaaatttgtgaattgataacttgtgtttttcgcataataaatccgccccactttttatttgataaaggctgtcacagatccagccactaatacgagtactaaaccaattaatacggcaaccatttcttttttagtcttttgttctttcaacacataaatcccaccgattgtggcgaaaatgacactggtttgggataaaacaaaccccgttgctaagccattcacagaaggttgtgctgagataagatacgtcagcgctgcaaacgcgaagaagaacccactgaagatattcttatacgaagttgcttctttgaaaggttgataagtcttgctggtttgggttaatccgaagataacacctacaattgccattcctaatgcttgtggcaaaaagccttggaaaccgtccgcgtgtattgcttgtggaaaggcggagtaccctaggtagcctagttcgccaactaataataacaagatgccacgcaccgcgccatttttactagcgcttgaacgatcttcactccaggctgttaaataaacaccaaggataattagaataatcgctgtgaacccaatcaacttcgattgtgtacttgcccagttacccaagatgaagacgccccacaaagatgccccaacaagttggaacccagttgtgattggcatcgttctagaaacacccatggtttcaaaaacatgaaaggtgataatctgcgctaatgcccaacaagcccctgaaattaaacaaaaaataaatgttttggtttctggaatcggtgtcccgcggaaaatagccacaataatggccagaattaatgtcccaagtgtcgttccaataatttgactcgctggtttcccaccaattttaccaacgatcacagggaacaatccccaaccaatcatcggcattaatccaattaagatattgacagcattcatattcaatcctccgtcctttattctaggctagtaaaacgttttactaactatcatggtgattattataaaggagcttctttgagaattcaactcttttttgtaaccgctttattaaagaacacaaaaaagattaatctggcgcgcatttggcctgattaatctttttttaatttattttttcttgcttgtccgtatcctcgtttagatttataacctgcatctaaaatttgacacatttcaacataatgtcgttgctgtgtttcttcagctttagcgccgtaaacataacgtgcccattcgcgttgatagcctggtgttagtgcgtcgaaaaaggtttttgtggctggtgtatcttctaatcgagcactcaatcggggaatctcaacttcatattctgatagtggtttttgtggcatggtgcataactcccttattttaaccgcataacatctctggcaatcatcaactcttcattagttggcacaatcaggaccttaacgcgtgattgatcactgctgataatgcgttcttggctgcggacattatttttatcttcatccaattctacaccaaaacaagcgagttgttcacaaatggcagcccgtaattcactgccgttctcaccactaccggcagtaaagaccagcgtatctactccattcattaaagctacgtaagaaccgacatacttcacaactcgattgacaaaaatatcaagcgccaattgggattgtggtcgtgagtcagcggtttcttctaaatcacgcatatccggtgatagttcagaaatccctaataagccagacttatggttcaaaattgtgatcatctctggcattgtcttacctaatttttcagctaaaaaggctactaatgagacatcaatatcaccagatcgcgtgcccatcgtaatccccgcaagtggtgtgaaccccattgatgtatcgacagcgtgcccgtcttgaatcgcggtaattgatgcaccactgcccaagtgcaacgtgatcattttttgcgtttcaagcggctgatctagcatttcagccgctcgatgggcaacaaaccgatgactggtcccatgcgcaccgtatttacgggccccatacttttcataatacgcttgcggaatactgtataaatagttttcggcaggtaacgtactgtaaaatgacgtgtcaaaaacagccacttccggtacgcctggcaataatgcagtgaaaattttaatgtaataagcttgggttggattatgcaacggtgcatattcagccaaacgattaatctcattgagcccaaccggattaattactgcagagtccttgaaggcttctccaccagcaaccacccggtgaccaacccccgtaatctcatcgagatgggttacgatatttaattccttcaaccgcgttaataataacgttgctgcttgttcgtgcgtcgtaatatcttggacttgtttaaacttttcctgattgccatacttcactgtgaatacagaatcagataagcctaaccgatcaatcattcctttagcgattactcgttcagacggcatttcaaataattgccacttcagtgttgaactacctgcattaatagccagaattttttccatgatatcgactcccactctttcataatccgttcatggcttaattgtaagcaatttcataaaaagaaacaagccctattatatcagagtgcgtcatcaacgggtaacttctgagcatttatctaacttagcgaattggcgatgcaatcgccgatttgataagtgtagcaaagcacaggaagttattgatgaaagcacgtttaaggcaagaatgcatttggttgcggtcagcaactgagcattaatacaaactagcgcttaatctcgattttaagattaagtgctagtttagattaagcggaagttgttgcaaccaaaaagcacgttttatccataaaaaaagaaccgcccccacgcggttcttcctatttcataataactattctgcactttcttcgttcattttctttactttatttaggaatgaacggcccatcttgttatcttggtattcacttggttcaatgacatctaaatagaattgatcaatgaatcgaatcaaaccatcgactttatcacggcccatttgtgcttcgatttcacggtatttttcaacatagcggctcaccaaccggtctaaaacgtcttgaccttgtttagttaagctcaaaaatttaacccgttgatctgtttgaagatgttcttcaaccacgtacccattttctttcagtaaccgacattggcgtgaaattgctgaacgactaacactcatcgtcttagctaacttactacctgttaagttttcgttagttgaaatttcgtacataattaaaaattggtcaaaagaaactttgtaatttaaactttctccactgacaaagtcgcttaaattgctgacaatccaccgataaatcaatgaaagatgcgttactacttcccaatcatcagaatacttgcttgttgcttttgctgtcataaccttttctccctttactaaccgatctgtcatgcgtagaaacaattaacggatttaatttattttgctatcaatatattagcatattttgagagaaaagaaaccactcgattcattaaatagctataaatagatttgatgtgcaacaattcaattgaccatataatcatcaacccactatattagtttgtcgtgactatataaaaagaagtcattaaagataaaattattttcatccttaataacttcttttaataacatcttataggttacgatccatattgaacgtcaatttcgataaattaatgcccgacataacgagttccccaatcatcgaggtcgcttcagtcgccatctgcttaacaatcgcatggttttgctcagtcaaatactccgttaaggcagcgccttgatacttttgtgcttccacttgaatggcttcaatcatcgttcgcaattcttgcttacaacggtttaagtaatctacattgccttgaatgtgctggctataatggccttccaccaatactgaaattgtccggtataaccaatatgcactcttcatatcccatttcattggtgtttcgctgaaacttagatccgtatcgttcgcattcgtgaaaaatggaatgaacggtgtatacgttggcatccccattgtgatccacatgatggccgcttgttcctttggcacatcattccgtaattgtaaaatatgtgcattttgcgtccgattcaaaccgattgggcggtaacgatacttgtcggcatcagtcccatgccccattggatcgaatggcgtttcattataatgtgagcctaacaacatttcaatatcttcaacactaattttatgttcaatacgccgaataaatggtaattcagccgattcgggtgacatatcaaaatcagcatcaaataaatgatgggcgtaccaaacccgtggtgtattatagtgccggtctttttcattcatcgtgccaaaaatgtggcggaaattccagcccgttttatccggattcaaatgatgggcttcaacgtattcttgaatgccttctgcccacataaaattgtcggcatccgtgaaatcaacttgttgaatcgccacttggttggcggcaactgcataagcatcatctggaatccgttgtgctagccataaatgccctgtcacaatttccatataccacacttcattgtgatcactaaagagcacactattgccggcgggtgagccgtattgtttaatcaaattaccgagatagctgaccccttcgcgcgccgagttaatgtacggcgcaaccatagcttgcatgcaatcttcatccaacccgtctttcaccaatggatcataagcgagggctttttcatttccatatgtactttcggtacagctcatcgccacgttaacttcgttaatactactttcatcataataaccattatgtttgtaatcaacattcggaacagcgggccatcggtagccattctcaggtaattcggcttcaaacccgtttaaccaagatttaattttagcacccttacgccctttaacagctggattgatgtgaaaccgttgtggtgttaaaggtaaaaaagtatcgtcgttacgcgcaatcatcgttgatccgtccaatgatgcgtttttaccaactaaaattgatgtacatgctgattccataagttgcactccctctgatgaccactttaattgaactcatcggtcacgtttgattaaaattttctcataattaatatccatagtgtacgcttctcacttgcgaaagtatagcctgattttttgattaatttcctttaacccccgcatttattgcgatttctatacaatattggatttcacgttaatttccgatttcggaattatcgtcaaacgaccatgttagcgctcctaatttcatgatatattattagatgaataactaacaacaaggtggtttctcaatgaaaaaattaacacttgctctgttgctgaccatgaccagctgtttcatgattctagctggctgtcagaataaaacagaaattccagctgccgcaactaaaacagaagaaaaaattgatcaatacgtccaaaaagtgaaccaactctatagtgatggttcccgtaaagatcctgcgaagttaacagccaataaacaacaccaaattatcactgcggctgacaaactcgacaaacaaatcacgcccaacctttatatgagcggaattagcgctgatgcaaaggctgattacaaggctgcccaaaaagatctagataagattactggtaagcaaccagcaactagtgaatctgaaagtgttgcttctgaaaagcctgctaaaaagaagaaaaagaacaaagttaaaacaagcgcctttttcgataaagatgggattgtcaaagccgatgcacaacttggtgaagaaacggactataccgaccaccccaaacaacttgctgattatcaagaagctaaaaatcaattagcggctatggcagctgtccggaacttatttacagacgacaacctcaagcatattccagctaacctatctgctagcgacttcccttacgtccgagctttgattaataaatcaacccatgacggctttaaagaaaagtacttggcgtatgttaagaacgctgaaaatcaatacaacacttactctaacaatacccaagcggcaaccacgcaaaacacaacaaccgctaatcaagcaacaactaaccaaaacacagctaccaatacacaaactacgacaggctatgctgctaacacggcaacggggaatggcactggtgcaacaactggaactgggacggggacttcgacaacggataccacaaccggaaccgggacgactggtacacaaagtaatactcagaccggtacagatcagacacaaaccggtacactccaataatcttaagacacttcctaaaaagtacgctatcttcttgatatgcgtacttttttgacgttcgcttacgtttagtcttttaatcgccgatatcttaagaaacatgtaacagcgcgctaactattatgtaacatgtttgttactttcagatgctatgctaatcagcgtactaaattaattcaaaattcaaacaacttaaaaaatttttcgaaggagcacaacaaacgcatgaaaaaacaaaaaatgacttacttatcttctggaatggttggccttgccggcttagtattgatgggtcttcaaacaaatgatgcccaagctgcaacaaatggtacggttaactacgctgacggggcaacaaccgtttggactagcccagcagtaggtcaaaaacctgctcgttacttggcaactaaccaacaagtaacaatccaagacacaaaacaagtttacggccaaacatggtacaaacttggtaatgacgaatgggtttcaagccaattcattacagccggcgatgcaactgctcaaccagctgcaacaacaaccgctgttaagaacacagtaacagctaacttccaatcaggtgcaacaactgtttgggctgacacaactgctgctcaaccaactggcgaatacttaacatatggcacaactaaaaacgtcattgatcaaaaagatttaaacggcacaacttggtaccaattagaaagcaaaggttggattcctgctagctacgttgttttaaacaaccctaacttggatggtgtcacaccaattacaaatgcacctgcagtgacaccagttgctgcaacaaccactacaactgaagttcaagcaccaactgctcctcaagcaacaacgccggcacctgctacagaaacaccagcgcctgctgcaacaactgaagcaacaacccctgttgctacaacaagtacaccagcagcaacaacacaacctgctcaaacacaaacaacgacaactcaaagcagccaacaaacaattcaagctacaacaactcaacaagcaccacaaacgaatacaacgacaaaagcaagtggtaacgcacaaactgttatcaacgctgctttatcacaaatcggtaccccttatgtatggggtggcacaacacctggtgttggtcttgactgttctggtttagtgcaatatgcatacgcacaagctggcgtttcattgaaacgtgttacaactgctcaagaaggtgctggtcaacgcgtctcacttgataacttacaacctggcgatatcctcttctggggtggcgctggcgcttcatatcacgacgcaatctacatcggtggtggccaatacgtccacgcaccacaacctggcgaatcagttaagacagcaagtatctcaagctacttcatgccttcattcgcagttcgcgtcctttaatcaaaaatatgtatttaaaaagagccacatcttaggatgtggctctttttttgtggttaaacttagtttgaaatatatttattttccatattaaaagaccatccaaaggctgcttttcaagcgacttttagatggtcttttaacattattttgaaaaaattcattataattatttagctgatttacgttccttcaagaagttcaatacagcagctgtttcagcgttacgttttttagcattgttttggttaacaggacgacggttaccagaaacactaacatgtaagttttgtgacattgcgcgtttcctcctttcgtgcatatattctattattctaatctgaattgacttatttttcaagttaactttattcgtcttttggttttctgaaatagtttaggagccaactggtcagcggaacggttgctatgaccccaatcactccgattaatagtgcgagtccctcaccaattaaaattttatggttcacaattttactaattggataaccgagttgaatgaaccacatcgttaatgacaagaagctaccgaaaaaactaaagaacagtgtgttaaaagccgtcgcaataattttttcaccgatcgcaatccccgctttaaagagttgcttggggcccatttgtgcgtcgtattctaagatttcgactaaaccactggcaactgcaatactggtctcggcgattgcccctaagctgcccagaatgatcatcatgatactaattttttggaacgacaagccgattgcgagtccaaagccttcaatctcttctgcatcttccgcaccaaagccgtaggtagctgctaactggctgaggggcacaatattgatcagcaagcccaccaccacgattaacgacgtcacaaacgccgtcttggccgttaatggctgcttggtattcatgaagatggatgtcgctaacaaaatcagactcaacagaccactcacaatcagcggttcaaacccacccgccaccaagacgagcgctaatataatcacgacaaaattcaacccgaggctgaagaaaatcgtcaacccttgccagccacagactagcactaataagatcagtaaaattcccgttagcaacatcataggcgtctcacccgcactaaccggctggccaacaagctcgttactggcaccgccaaagtaatcccaatcgcactaatcaccgtctgcgtaaaacttaacgtgacagttcgcgataaggtatacgcaattgtgttgccattgcgtagatacaataaaataattggaaaagcatccgccatgactaaaaagaacaacacattaactaacggaccaataatttcgcgaccaattgtgagtcctgatttaaacaattcagtcttcgtaacgtttggccgttcaatcgctaattgctggagtgacgatgaaatatcggtcgtctcatccatcacagcgcctaaaatcccgagcacgacttccgctaagaagaccgttttatacggctgtaattcataggccatcgtttcataatgcaagccttgatcgccggttaatttcaagacggccatgctgagaaacagtgctaggaacgttgcgccaattgtcgcgccatatgagacaagcatctggcggttgggtcctaatactaaaagtagcgttaaacccgttagaacgaccgctaagccacacataatcggcaataaccaccgtccacccgtcatcgcgtttaaatggagtgttaagacgaatgcgacgagattgaccaagacactgattagcgtcatcaatccgcgcttgagcatcattagtaataggaaactaaacgtcaacagtgttaagccaacgatgattgtatcgcgcttaggctcgtttaaggtccactttttcaaatattgatcacggtgtaaaaagacttgttgtcctttatagtaccgcgtcgacatcgcttgcgacgccgtatacgtattgcgcagcgtaatcacttgccctttttgcttagtgttcaaaaattggcccgtgacccgctggactacttctgtatcttcattttggtacgcatcagtctgttcctcacggctaattgtctggacccgcgttacccgaataatcggttgctgatacaaaccagcatcgaaatacgtccctaatacaccgaggacgcagatgacacttcctattagaccaatccacagccgtttatgttttaccacagtcgtcacctctgttttattctagcgtttctgcgggtgaacgtcagctttttgaggctgatttaatcattatttaagcgactattgaaaatcccatacgtaaagtagaccactaagccgatgacaaaccagattgccgctgcaatccaagtgacttttggcaattcaaacatcatcaataaacatagcgctcctgatattaacggtaaaactgggtaaaatgggactttaaacccatttttattcggaatgtccttgcgcttccgcaatgggatgaccccaatcgacatccagaaaaaagccaccaatgtgccgatgtttaccaaattagtcaattgatccagtgaaacgaacccgcctagaatcatgatgactaccgtcacaattttgatactgttagttggggtttgatgttttgcagtcactttaccaagtgcttttggtaataagccatcacgaccaattgaatagatgaggcgggaactgctgtaagtcatcgtcaacatcatcgtgaacatccctgctaatgcgccgagtgaaatcagaccggcaaaccaattttgatggacgacttgtagcgcgaatgtgaccggattagcaacgtccaattcgcggtacgacaccatccctgtgaggacaaacgccactaatatataaagcaacgtacagatgattaacgtcccaataatcccgataggaagatttttttgtggattcttaacctctgccgccgatgctgacacacagtcaaagccaaggtaagcaaagaagacgagtgatgcccctttgaaaatcccacttaccccaaacggcatgaacggttgccagttagcgggtttcacgtagaaaatcccgacactaatgaaaagtagcactacgcctaatttaatcaaaaccatgatgttattaattcgtgttgatgaacgagtccctcgcattaataatgtcgcaatcaagcccactaccagcatcgcaaacaggttcacataagtgccatgtgccggatcaaacgggccagtaattgcatgcggaatatggatgccaaacccttcgataaatgatacaaaataagccgaccaaccagttgaaactgccgcaactgacaacatatactccaagaataaagcccagccaagcagccaaccgattaactcaccaaaaataatattgccatatgagtaagcacttcccgcaactggtaatgccgatgaaaattcggcgtaacacatcgccgcaacggcacaaacgaccgccgcaatcataaatgaaatcgtgattgccgggccactatgtaacgccgcaatcgttcccggtaagataaaaatcccggtcccaatcactgcccccacgcccaatgcaattaaatccttagccgttaatgttttggccaaccgttgatcttgttgtaaataacgttccagtgattcttttcgtaacatctttgccattaatcccattttaaccactcctatttttattgtatgcactcgactaggcgattactcgccgcctaccaggcttcgtcgcacttctttaacgtgctccttgaactgccttctgcgcttaactacagaatcacaatggcggtcgtacgcccaccattgcgctttttaggttatgctcgaagccaaatcgttcaagtcgcacttctttcttaacgtgctcctcagccagatacttccgtatagctacgtccagtaaacaaagctacaacccagctttattcactggactatgctattactcagtatctaaccaggcttcgtcgcactcatttaataacaaaaaaaggagcccactagtcttcactagtgagctccaccaggaagatgactcggggttacccagccatcttccaattcattaaggtttgtcatttcaactcaaatgccttctccttaatcaaccagtcgattactgggtatcttaaagaaaaagctaaaggcaacacgttgcattgaattcatgacagaccctccttgttattaattagttacttagtataggggataaccatttatttgtaaaggattattttaaaagttgttttctaaaaataatctgctagaatcaaatttaacttattcaatggatgtgactggcattgaaaatcgcatgctatttttctgacaactcgattggtacgaactgttcatgcacgtgcgtggaccgtttatttccgattgccgttagagattgcttgcgttaattttcaggtcagttacctaaagacttgttaaaagacgctgttattgcgtctttttttgtgcatttttaacgacaactgggccaatctcattcaatcaatgaggtgataattcatgggcacaattcaattcaaagcactcacatttaactattcagatcaaacacaaccgttgttcgatcacgtcacgcttcaattcgacgccagttggaaactcggtttaatcgggcgcaatggtcgcggtaaaacaacgttattaaaattacttcaacaccaactaccatttgatggccagttggttaccaatctcgattttcaatatttcccacagactgttacagaacctacgcaactcacacgcgatattctaatgcagctaggtaacctcgacaattcaaccttctggcaagtcgagcgggaactgcggctcctacaagtcgcacccgaaatcgtctggcaaccatttgcttcgttaagtcctggtgaacaaaccaaaatgttactcgccttactattcatcgacgactatcattttcaactgatcgacgaaccaaccaatcacctggatcaagaaggccgccaagtcgttgccaattatttacgccaaaaagccggcttcattgtcgtcagccatgaccgccatttcttaaaccaagtgatcgaccatatcctagcgattaatcgtgccgacatcaccgttcaccaaggcaactaccaaacttggcaaaccgcccacgaccaacaagctgcttatgagcaacaacagaatcaacaactcaagggcgatatcaaacggctgacaaaaacagcacaacaaaaagcgcagtggtcccacgaagctgaaaaagggaaaaacgccgccagtgtcaaaactgaaagtgccaatctcgataaaggcttcatcggtcatcgcgctgctaaggttatgaaacgggcgacgacaattgccaaccgcgcggaagaagcaatcgaagcaaaacaacaactttttaaaaacgttgaaattgctgcaccactgaccatcaatcagcgacccctcaaacccggtcaaaatgtgcttagtgttgatgaacttgtcttacaacaagacggcgtcatccttaatcaaccactctcattcaccttagaagctggtcaacaggtcaccctaactgggattaatggcgcaggtaaatcaacactgattaaggcgttacttgcattacccgcaactgaccacattgccagcggtagtctgcaccttaatccgcacttaaccctctcgtatcttccacaagatttcgatcaactgagcggctcactggccgacttcgctgctgcgaaacaggttgatcatgaacaactgctaagcacgttacgcaaactaggctttgaccgcgatttatttacccaccgtctagaaatgatgagcatggggcaaaaacgcaaagctgcactggcgcgttcgctctgtgaagaggccgactgttacctctgggatgaaccgttgaattacctcgacgtcatcacgcgtgaacaaattcaagccctaattgccgagcaacgcccaaccctcctattcatcgagcatgatgttgacttcgttaacgccatcgccacccaaacctacgcacttcaaccacaacactaatccgtattatttgtataccgtgtcacgttgtacccgcgcacgttgaagtaagtcgttggcgactcatcatcaaaaaaggccgggttcatatcattaagtcgcgtttcggtattggttaacgtttgttccggcagtgctaaattttcacggagccgattcgaagcagcctgcaaatcttctgtactaatgatttgataggtactgccgttaagccacgccgttttacctagcaattggctgctgacaatttcaccactactttgatgatagttgcgaatcaactgcttcacttggtcggctgtaaaatcagtgctaattttctgaccaagcttagtcattaagtcaccaatgttcatcaaatattttggcttttgaattttttgcgcaacttgtttcaaaacttcttgttgccgcaattgccgcccatagtccccgcgcggatcttgataacgcatccgactataagcaagcgcctgatcaccattgagatgatggtggccttgtggaatcacttgtccattcaaattaacgtcaatcaccgtatcgatggtaatccccccgacaaaatcaaccaattctttgagtgcgcccatatcgaccgtcaccgagtagtcaatcgggagccctaaaaactgactgactgtttttttcgccatcttagccttaccaatttcataagccgcattaattttctgaatattaccgccgtggtcatctgccatctctgccaatgaatcacgcggaatagagtagaccaccgttgcttcttacaccgggttaagtgttacaaccatcatcgaatccgacagaccacgatcaacgcgcccatccgcgcctgtgtcaacgcctaataataggaacgagattggctttcgctgatcaatttgttttgaaattcgactagacccggttttaatcgcatcaacagctttatcctcttgatgcaaataaaaacctagcgccgccagactaatcacaacaatactactgattacaatcacgatactgatctttttcacagtcaattcccctttgtttaaacgcccaccgcatccttttttagatatgaaccaataaatgctgtcccccttttgaatcgttcgattctggcggacagcattttattttaacctttgctttaaccgacgtaagccaactagcatgaccggcgctaagtgcgaccgattaagccatcgtagccaccgggatgtgccggttggtaaaccacgttctaaattgatcaattgcgtctgaatgaattgtcgctcaggaacagtcagtgtgcgctgatcaaaaacaattaacattctaaaaaaggtccgcacatactgctttaaaaatcgtgtgtaagctgcgcgatccacttctgcaattccagccactaattgcgtctcaatgatgtgcagagctgttaagttaactgagaaccactgcggctttagggtactcgtagccgcctcagcatgccctatctcgtaaacatataaaaacgctgcccgatgcctaacaactcggcaatgttgtaaatactgcaagttgaaaattaaatcctcaccgatacgcagcgattcatcgaaccgcaatgcttcagcttcaataatcgctcttcgatacaatttattacatgattgaaagaagacattttgataatagtagtctaaaaaagcccttttgccgtcttgtattgatagtcaccatcttcagtcaaaccaaaagcagaatccgttccgccggctctttcgattttagttctgaatagcacccaatctaccgactgaccgacgactggttcaaataattgggcactgttaaccaagaagtcatcggcattctcagcatcaagttaagcccataaactaatcagtcataaaaaggctgcatcaaaattacttttgatgcagcctctggttcaagcatagactaactacgctttgtttgttattaatctaatttccgttccaactcactaacgatttcagcatgttttgcttccgttaatttaatcttagccatgaagattaacgctgaaataaccaataacgccattggaatgaagaacatgtacattttgaattgcaacaaccccgcgttagtgatatcgcttggtttcgcattcccagtcatgccagcatgaatcgcagccgtcacaacgacgccgtttgcaaaagccccggctagtttatccaataaaggtcgcactgccaatgttacagattcattccgtgtaccacttttcaattgtccgtattcaacactatcggtaatcgtcatcaaagcagccaaaaagaccagtggatatgggaagaagaataagccgaccgcaattaagactacgaccaagttacttccagcaaacaagaagaggatataaccaagcatcatcattgcgattccgccaatatagattgcccggcgatgaattaaagcaaccaatgttgggaacaacgcaactgacacaatccctaagatggcagtaatcacaccaaccgttgagaacgctgcggcgcggcccatgacatatctaaaataatataaaagcagtgagttcgtaatcacataactaaaggcaaataagaaatatgaaagagataaccacattaattggtcatttttaccaatcacactgaaaacgtcacgtaaccgaaccttttcagtattttcccgaatagcactcttttcttctttggttcctaagatggtcgctaaagcgcctaagaatgaaacaaggccaatgacaacggcaaaaccgaaccacccggcactggtttgttcactcccatgactcccagaaaatagttgcgagaagaaaaccaccattggcacaatcacgataatgaccccttgtgcacctaaagtggatccgaaacgcgcaatcgccccaaattttgtccgcttttcagaatcaacactcagcgctggcaacattgaccagaacgagatgtctttaaacgagtagaagatatctaaaatgacgaaaacgattgcaaaaagaactaagtaaagataagggctacttgtcgcaagccctccaaagttggtaaaaatcatggccaagccaacagagctaataattgaccccgccagtaaccacggcttaaatttcccccaacgcgtccgtgtattatcaaccactccaccaatcagcggatcgaaggcaatttcaacaatccgaatgaccatcattgtataagtgacatacgcaatcatttttgaattaaagcctgcatttttggtatcgaataattgactcgtgacgaacatcataaaataagtgctaagtgttgcataaaaggcgtcatgcccaaaggccccaaaagcgtaagaactatactgtttaacatcttttagttttttcatttctttagattcctttcgatagtttcttcattgtaaacatgctttcatcaagcacaaccctcgggttatcccgtttgatgacgcactctagtgatagcgatgttcgataattttttccaaaatcgcttggcgttgcttttctttggctgagccgaattggttttcttccaatgaattaaaatcgttggcgagtaaaactgattctagatataacgtcaattgacgcttgatataaaccttattgtcttcattcgtttgcttgggattcccagcgataattgctgcagcaaattggtctggatcgataataattttgttgtcgttcatcctagtcgcttctttctcttttagttagtaaacgtttactatctacaccatacaaataaatcaatctgtacaagaactatcctgtaaacgcattcttttagattgcaatcttattttactaaacttttagtaaaatgtaaacggttatttggaaaccgttacattcatcactggttacagttatgaatttaatttcactaaatatttatttttttattttttattgaaatttaatttcattagcgctatactacatctatagaaaacgctttaaaaagaaaggagttgctttatgtttggtttttctatctatcttaatcaaccgttcacctcagcaagccgcatgaaccttcaaaaaatgcacgccgctggcttcacagaagtcttcacgtcgatgcatattcctgaagatgacatttcacaatacactgctagaatcaaagcactcagcactgcgtgtcgcgaagaacacttacaattgatgattgatattgaaacaagttcattaccagcagttggtctctcacttaacgatcccgccgcaatactgtcctttgggattactggtttgcgaattgatttcggcatcgataattcaaccattgctaagttatcacaatatttgaagattgccctcaacgcaagcacaattgccgaacaagatttagccgttttacgcgcagctggtgccaacttcgctaacatagaagcttggcataattattaccctagaaatgaaaccggtttagaacgaacctggtttactgaaaaaaatcagtggcttaaaacgcaaggtttaaccattcaagcttttgttcctggtgatggcattttacgcggaccacttgaagaaggattacccactttggaagcccatcgttatcagcatccgcttgctagtgcgctcgatttattcaactgtgaaacagataaggtcttcatcggtgatccaactttagcaaaaaccactctagcgcaatttgatgcattctaccatcaacacgtcataaccttgtacatgcttaagtcagccccctgccccccttatctttttaaccaacatttccataatcggcgcgatgtcgcccgtgatgtcatcagattagaagaaggccggccactttgtcagaccacaatccaacctgaacagacatcagtacgattacgtggcagcatcaccctcgataaccaagactatggacgttatatgggcgagttacagattaccaaacatgacctacccgcagattctcgtgttaacgttcttggaaaagtcatccaaaaagatcacgcattactgccattcattcaggctggacaagccatccaactaaaggagattgattaatatggatttaagtcatttaacaaccgaaaaccgtaatcaaaagacaatgcaattggacgaactttcaattgaaaaagtactcacactaatgaacgaagaagatcacaatgtgccagaaagtgttaaacaagcactccccaatattgaagctgctgttcaagttatcattcaaagtttccaaaatgagggacgcttaatttatatgggcgctggaacaagcggtcgtcttggtgttctcgatgccgccgaatgtgtccctacttttggaacagaaccggaactggtccaaggtttaatcgccggtggtatgcaagcaatgaccgttgccgttgaaggggcagaagattcaccgacattaggtcgcgaagacttggaagcaatccacttaaccgctaacgatacagtagttggtattgcggctagcggccggaccccatatgtcatcggcggtcttgattatgccaaccaaattggtgccagtactgtcagcttagcttgcaacttcgatgccctcatcagccaacatgccacaattaatatagaagtcgaagttggtcctgaaattttaaccggttcgacccggctcaaatcaggtactgctcaaaaattggtgcttaatatgttatcaactgcttcgatgattggaattggtaaagtctacaaaaacttaatggtcgacgtgaaaccaaccaacgaaaaattagttgaacgtgccaaacgaatcatcatggctgcaactgattgtacttacgatgttgcggcaacccaatttagcgccgccaacgaagacgttaaactcgcaattgttatgattttaacggatttatcggctaatgaagccaaagaacgtttaacacaagcacacggttttgtacgtcaaactattcaataacaaaccttaaggaggcactattatgactgaaaaaaaagaagtacgcttagccagagaaatttacgccgctgttggcggacccgcaaacgtcgctaaattaattcactgtatgacacgtgtgcggatgacaattcgtgacgatgatcaagttgatatgactgcgttaaaagcaatcgatggcgttttaggggttgtcgaagaagacacgcttcaagtcgtcgttggtcctgggattgtcaataaagtcgcccaaatcatggtcgaccaagtcggtgttaaacttggtgaacccttcccagaaaatctcaccacaactgccacagccgcaacaatgaccgaccgcgaaaaagtcgaagcaaaagccgctgaagttaaggcaaaacaaaaagcaaaacaaaagagtacgccaaccaagcgggtcttaaagtcgatttcaaatattttcgttcctttaattccggttttcgtcggcgctggtttaatcgggggaattgccgccgttctatcaaacatgatggtcgctggatcccttggttcaaactggtctgaattcattaccatcttaaacgtcatcaaaaacggcgtcttcgcttatctcgcaatctatgttgggattaacagtgccacagaatttggtgcaactcctggtttaggtggtgtcattggtgctgttacacttctaagtggtgttgatcctaagttgccattacacaatatcttcaatggcgatcctttatctgcaggccaaggtgggattatcggtgtcatcttcgcagtttggattctctcattggttgaaaagaaattgcatcaatttattccagattcaattgatattattgtcacccctacaatttcattattattaattggggtcttcacaattttcatcgttatgccggtagccggtgtgatttcaaattcacttgtcggctcaattaattggattctgaatgtcgggggtgccttctctggtttcgcgctcggtgtactcttcttaccaatggtaatgttcgggctccatcaagtcctcacaccaatccatatcgaaatgatcaacaaaacaggttcaactttacttttacccatcttagcaatggctggtgctggccaagttggggccgcacttgccctttggattcgttgtcgtaagaataaagaactcacaaatatgattaaaggggcgcttcctgttggcttcctcggcattggcgaaccgttaatttacggtgttactttaccattagggaaaccattcatcactgcctgtatcggtggtgggattggcggtgccgtcattggtgcaatgggcggcgttggtgcgattgccatcggacctagtggcttagccttaattcctttaattacaaacggccatcaattcgcttatatcttaggcttgctcgcagcttatgccggtggctttgtcgcaacttatttctttggcattcccaaagatgctacaatggaaaaataacctttaaaggacgctgattttatggaaagcatacttttttcaattcaaaagaaactcccaactttaaccaaaacagaacagcggcttgctcaatacgtacttgcccatccagtacaagtaccgacaatgacaactagtgcgtttgcaaaagcggctaacgttagtgcagcgactgtcgctcgctttggtaaaacactctgtggtcaaggtggctttccagcactcaaattacgactttcatctgaagggaataccgatcaacggctcttcgatgaaattaatccgaccgatacaacaactgacttaaaaaataaactaacttttcgaattaaccaagcgattactgaaaccaatcatcggctcaagaatgacgcgctcgaagaatccgcaatgattctccactcgaaacaaaccattttcatttatgggcttggtgcttcaaacgttgccgctgaggatttacaacaaaaactactgcgcgttggtaaatctgtcattcaatcacttgatacgcatctactggcagcagcactaaccacacagaaaacacaggcagcacttatcttaatttctaactctggcgaaaaacaagagcctctgcaacttgctaaaattgcacaacaacttaatattccaattattgttttaactcataataatcaaagtcaaatcgcacagttagcaaccatcacgttacagcatgatgatagtactgaaaacagtcagctaagaagcgcggcaacgacttcattaattgcacagctttacgctgtcgacctactctattacagtttcttagaacaagatttcaccgctaatacgaaccaattagctgattcatcgaacgttatcagcgaatattttactaagtagaaggagtcatcattatgaaactattctcacgtaaacccaaagaactcgaattacacgctattgtagatggacccgtcatcccgctcaaacaagtaaccgacgccgttttttcaacaaaaatgatgggtgatggttttgcagtaaaccctagtgatagtcatatctactcaccagtggacggtattatctctagtgttttcccaacaaaacacgcgcttgggattacaaccaaaacgggcgttgaattattactccaccttggcttggataccgttgaattaaacggtgcgccgttcaccattcacgttcaagaaggcgatccggtgacaacagaccagttattagttgaaatcgacttagctgcgcttgcttctgcgggtaaagaagcaaccagtatggtgattgtaaccaacatagacgatatcagcggtgttaatgcccccctaacaactagcggacaccacggtgaggttgcacaaatcattaacttataaaaataatatagaaaagccccgctcagatgagcggggcttttctatattatttggctaagactgttatttgattattataacatgcttgattatcaaactgcatcaatactttagtcgctagatcttgcgttgcaaaaactaatctttcaactggcgtatttgccacgttgtaagccatcatgtgtgaaaaataaacaaactgtaacatattactgtatgccgaaacatcgccttgtttcacaatttttttaacgaaaaaattaacgatatgatcgccaaaacgaacataacctggaatcgaaatcagttgtacgttggactgtttagcagcctacacacgattggccgcattatctggcgcgtaaatgaccgttgtccctgtcgtttggtctgttggttgcattgtaattaaagctgtttttgacattaatagatactcctcttaagtgatgataaggtccattgtaccagagattaccgtttattttagtaattctagaaaacggttctgccaaacgttttcgtaaaaggcaattgtctgttcagccgtcatataggcgttgtccgttgtagttgaaagaccagctaccatttggagttggtagcccaaatggtgggcaactttaatcgttgtatcgacgcagtatttggtctgggcaccacaaatttcaagcgatttgatttgcatttggctcaataacgtttgtaagtttgtctgccaaaatgaatccgcatgcgttttttgaacaaagattgccgttttaggcacattcaattctggcattatctaccaagtcgactgaccagcaatcaaagtcttatcgttatgttggacaaaaataatcgggcgactttccgcctgataggcatcaattctggcattaacgcctttaattaattgattaagacgcgcaacaggctgctcacttttgcagacaccattttggagatcaatcactaataaacaatcggctaacttcagcattagtcccctctttcctttaaatcaaatcgagtatatcattatttaactaaacctcatattttgtctgacgatattaaaaagaagagatgcggattacccccacctcttctttttcaatgtctccgatgtttttcccgcttcttaatctggtgttgctgaaaacggctgtattgtatggccttcttttcggcatgttgttcagccctattagttgcatgttgtgctttacgttgactactcatccgaatctttttgttgataccaacgaattgaataccaatgataactgacttggcaccctcaaccacttgcatttaaacaattccttcacatgattatcgctcaatcccccactttcccgccaaaagcgttatactatggataataaataaaaggagtgttttgacatgcaaaaaccaattaaagggtcatgtaccacggtcttagtcggcaaaaaagcttccatcgacggttcaaccatgatttctagaaatgatgatggccacgaagctttggatccacaacgctttgttgtggtcaatcctgaagaccaaccccgagattatcaagcggtgattagcggcgttcaaatccaattgcctgataacccaatgcgctatacctcaattcctaactcattattgacgaacgggatttggccagctgctgggattaacagtgaaaacatcacgatgtctgccacagaaacgattaccactaacccccggattcaagggcttgatccttttgtccctggtggcatcggtgaagaagatattgtgacattagtcttgccttacatccacagtgctcaagaaggggtcgaacgtttaggcgccctccttgaagaattcggcacatacgaaccaaacgggattgccttttctgacaaagacagtgtttggtggcttgaaacaatcggtggtcatcactgggctgctgttcgcatccctgatgatgcatacgtggttgcccctaaccggatgaacatcgatcatttcgactttgattcagccgacacgctttgctcagctgatttaaaaacattaattgatgacaaccacttaaatcctgactttgaaggctacaatctccgtcatattttcggcagtgcttcaatcaaagatacggtttataacaacccacggacatggtacggtcaacaatacttcaatcctgaaatcaaacaagatccaatggaccaagatttaccattcatctgccatgccaaccgcaagatttcaatcgaagacgtcaagttcgtcttgagcgctcactttgaaaatacagaatacgatccttacggtagcgcccctgaagatgttaaaactcgtttccggccaatcggaattaaccggaatcacaacgtgcatattttacaagtgcgcaacaacgtgcctgctgaaattgccggtattcaatggttagcttatggtgccaatacatttaacaccgtcgtgccattctacacgaatatcaacgacacaccagaatcatacaagaatgccacaggtatttttgacttgaacaacatgtactggttaagctgtacaaccgccttacttggcgatacagattacgacttctacgttgatatgcgtaacaccttcgaactcgaagcaatgagtgcctatcacgtgatccaaaacgaaaccgacaaggccttcactgatcaaaaagacgctgcagccttcttggaagccgctaataacaaattagccagcgaatcacttaaacgccaaacagccctacttggccaaatggtgatttcaggctcagaacacatgaaattacgctataacttgaacgactaataattatttaattcaaaaaagagcgtctcagctattcgttagttgaaacgctcttttttgagttgtcctcttttttcagtagcgtataataaatactattactcaaaccacactaaggagtcatttatcttttgaaaccccaaaaattaaaactatcggattacttactcggctttggattcgtattattgatggtgggcattgccactgtcttgaacgatgttgagattattctacccgaaatcgcagccttaacaacggggctgtggatttatcacgaaccgggttggctcaatcaacccgccaagatattttggctgccatcgataaccgccatcgttgggtttggcattaatcggttgccgctcagttatgcagttaaaattagcttactactactcatcatgattgttttactttgtttatttcgctcaacactcgcaccatcgtttgcaacggggctgttaccgattatcgtcaacgccactgaactttcattcatcattgcaattttaggctttacgctcactttgatgttggtcgttagcctccgcaaattgcatctgcaacatccctatcatgccacgattaactatcgcgtcatgctggtttttctaatcattgcactcttatgggtgttagttgttagtttactcggccggccacagatggctgccattccgccggtacttgtcgtcttttttgaaattctacaaaaaccaatgtatccaggtaaaatggccatcaagcagatggttgcattaactggcgccgccacaatcggattcgtcgcttatagcttacttgattcacggttattggtaaccttaattgcactgccactagtttgggcattactctatctgctacaagtcagaattcccgccgcctacgccttccctttattggccattattctcccacaccaaatgtttcaaagtttgccgctcgtcactttactggcaactagttacttttttggggctgcttatttataccagcaatacattaagccgcgtctcatcagcagataacatgacggtttacgactaattttattagttgtaaaccgttttttagtggctttttgcacaagcaataatattgcagtttcgctgagaaataatatagttgagttgaccctgtcttatctctctgggcacaaagtgcaatgaaagaggctatttacatgacaaacaaactaacgactaatgagggccaaacgtgggcggataatcaacattcgcaaactgctggtcaacgcggtcccgttttaattcaggattattaattgctcgaaaaactcgcgcattttaatcgtgaacggattccagaacgggtcgtgcatgctaaaggcgccggtgctaaaggttacttccaactcactaaggatatgagcgcctacacaaaggcagccattttcagtggtgctggtaagaaaacaccaatgattgcgcgcttctcacaagtagctggtgaagccggctatcccgatacttatcgtgatgtgcgtggatttgcccttaagttctataccgaagaaggcaactatgacattgttggtaataatacgcccgttttctttgttaatgatcctctgaaattccctgatttcattcactcccaaaaacgagattcacgaacacacgcgagaagccaagacatgcagtgggatttctggtcactttcacctgaatcagtccatcaggcgacgattttaatgagtgatcgcgggattcccgctagttatcggatgatgcatggctacggtagtcatacctttaaatgggtgaatgctgctggtgagcagttctgggtaaaataccacttcaagacaaaccaaggcgtccataacttaagtaacgaactggctgccgaattggctggtaaagatacagattatctacaaaatgatttattcgatgcgattgaaacaggcgaccatccaagttggaccgttgccgttcaacttgttccttatgaagctggtttaaactatccgcaagatatctttgatgtgacgaaggtcatttcacaaaaggattaccccttaatcgaaatcggtcaaatggtactcgatgaaaatccaaccaacaactttgaggatatcgaagaattggctttctcacctgctaacttagttcctgggattgaagcttcccctgacaaactcctccagggacggttgttcggttataaagatgctgaacgttaccgtctaggtgccaactatgaacaattacctgttaaccggccaaaagtgcccgtgcataattacgaacgcgacgggatcatggcaaaaaaccaagagacaggcgtcaactatgaacctaatagtgaaaatggtccaaaagaagtcccatctgccaaaattcatggcgaccaacttagcggtcaaaccggtaactatccagccgatcccgattactattcagcagccgataagctttacaacttactaactgatgaagaacaagatcgactaatcgaaaacattcgcttaaatctcggccaagttacaaaacctgaaattcaaatccgcgaagtcaaacagttctaccaagcggatccagaatacggtcgccgagtcgcaacggcattaaatttagatttaaaccaatttgaacactaatctatacaaaaagaaggtatccggcccaccggataccttctttttatttatcttcttttggagaatcttgttttgctgcccattctttcttggtcatcaagtcagagacattcattttaatcttcgtcacgtttaaaccagtcatttgatgtactgatttagcgatgcgttcaattgtttgttcgaagatgtctggcgctgatttaccgtattccaagatggcatccaattcaatcgttacttcttggttatcaatatcagcgtcgacgccctttgtcggatcttcttggtctctgaaacgatcagctaattgactcatcatcccgcctgataattctaagacgccatcgatgtcatgcaccgtttggcccgcaattttttcaatcacaccatccgagaagttcaattctttttcgattttttcggtatgttgatccattgtcttatccatcattttatccattggtttgtttggtttatccatcgttttcatcatcctttactatttttattgaacgcgtttttcagaatcacttttctttggattactgccttgttgttgccattctttcttagtcataatgtcactgacatggctgttaacttcgacaacactcaaaccggtcattgattcgacagcttcagtcactgcagctgttaatcgttcgaaaacatcccgtgcattccggccgtattccaaaataatggtcatgtcgattgcgacctgtttttcgccaacttccacactgatgcccttcgttggatcactatcgtttctaaaacgatccgcaatatcactgaagaaattaccgttcatcgataataagccatcaatgttttgcgctgtcttaccagcaattttggcgattacagcatcttcaaaagtcaatttgctattggccatcacttcatctaaatgtgcttgttctaccattttgtcacacctccgttatttatcctgcttcaagacccggttaacttgtgatctaaatccttctagatcttccttagaccctgttaaactagctgcaatgtagccgagtaaaccagcgatgataatcaagattaaattcataaatccaaaactaatccaaatggctgccaacactgccccaacaacaaagccccaataagaacgtctcatttgtctcacctcacatcactttttgcctgattacttagcggtgatagtttgacattcactgctttaatcggcatctcaaagattgtttgtaatgcttgctgtaccgtttctttaactgcccgtgcttgttgatcgagatcgttgcgatccactgcgaccgcttgaacgtcggcagtcacttttggatgtcggcctttaaacgtcgtatggactaacacttccttaacacggtgtttttcaataatagcttgtgtcactgttttttcaaccgctttgcgggaaagtgctagttcacctttatcggtcttgatgatcatttggcgttttttcggtggactgaataatgccaatagcagtaaatataagaaaattaagccgctaagcactcctaatccaagtccaaaattaccgacccattgttcgggtagccaactaagatgcataaattgcttattggattgttgtagtggatagattaatgtgataaaccacgctacctgacacaacccaagcaaactggctaaactgatcaccactttagttaatttattcatggtgtccgcccctttgtattaggattttctacgtgtgaataataatgaaacaacgaaaacgacaatcacggcaccgataatggatggaattaaggccatcccggcaagctgtggtccccagctgccaaacaatgattggcctagccaggcgccgactaacccaccgacgatattgccgatccaacctgcaggtaaatcacgacttgtcaatgcccccgcaatcaccccaattaaagcgccaataattaaaacccataaccaatgtaacataacaatcatcctttcttgtttccttaaaatatattgctggttctccataaatgtaacaaattcaaccagcatccgtaaaacaatacgcttatcaatattattaaattatcgtaaatgcacttgtttaattaattgattcgccaccggtaacgccgtaaatttgaccggtaatatagcttgctgcgttgcttgctaaaaaaacatatagcggtgctaattccgccggttggccggctctttctagcaatgtattctgcccaaacttaggcaaagccccttccagttgtccttgagccaactgcaacggtgtccaaatcggacctggtgcaaccccgttgacccgaatacctttatccgctaattgttgcgctagattgatcgtaaaattcttgattgctgcttttgttgctgcataatctaacaaatgcggactcggattaaaggcttgcactgaagtggtcgtcagaatactgccgccagccggtaattgagacaatgctgcttgcacaagcgcatacatcgcaaccacattaacgttaaaactatcttgaacttgttctattggtaattcggtaattgatggatgcgcaatttgttgagctgcgtttaagactaatgtgtcaagtgtgccaatttgctgctgcgcggtttccactacttggctagcaatctgtggtttccgaaaatcagctgggatcaatgcgattttacgccctgcatctcgcaccaattgagccacttcttgtgcatccacttcttcacctggcaaatattgcaatgcaatgtctgctccttctcgggcaaacgcaattgcaactgcgcgaccgataccagaatctcctccggtaatcagcactttacgatctagtaaccgttgtgcaccacggtagtgttcttcgccacaatctggcttgggatgcatttgatcttgcaatgccggactaacttgttcttgttcttgaaatggctctgtccgataaagtgttcgcggatcttttaaatctggtttacccatcttcttgttccctcttttccaattaatctagatacactgcttttaaatgttcaatgtcctgcgttgttaatcctaaggcctgttgtaaataggcttgagttgaaccataatcctcattgattatgcgctcagctgcgtttaagtaggactgatcaacactcatcaatgcatgcatactttttaaaaagccgcttgaggcatctttttgacgtagcgtcttaatgcgggctgcaacgtgttccctagatgctgtattcgataatagataatcatattggatcacatcttcaggtgccccgagtgcatttaataaataataagccgccattccggtacggtctttgccacctgtacagtgaaataaaactgcttgttgcggatcggcttcagtcaataatcgttcgaagaattggcgatacattccgattgaatagggatcttgcaccatttctcgatagacttggcgcatttgttgctgcccaccaagcggattattggtgtagcgctcataaagttccgcttcactcgccgtactttgcgtcgcatcttctttaaaaattggcaacgattcgtaagatgccgtcgtaatctttttatctggcgcttttttgcgctccattggtgaacgaaaatccacgacataggtgatatggtagctttccaagagcaccaattctctcttactaagattcgccagattccccgttctgaataatcgatgcggtttaatcgagcgaccatccagtgtttgatagccacctagttctctgaaattgtagccatttttaattggtaatatgcgcgaaaccatcgactcatcctctctaatcaaccactttggctgctaggatcattgattatcatccaatttttgaagacacctttttaccgtcttgttactaaaaacacgaccatgatgatcaaattccaatggcccccagctctcaccgacgagggcctcaccgttattctctcttaaaattgcttcctccaaatcagtcataccttctagaaaacactttagattggctgattctttcttaatcaccaagcacaattctggggtcttgactgtactacgacctaacctaactttcctaattgggacttctttttgcataagtaaccttcctttcatgaaatttttaataacgctacaccatcaatataaaataatcacatttattgatgcaacttttatgattacgctttgttattgttagcacaatcatttacctttacaaagattgttgaagctgtttaaataaaaacagaacacctgaaaggagatggttattatcaacgctattaatatcatatttgccgcagatgaaaactatggtgatcaacttttaatcgccataaagtcggttctaacccatatttcgcccaaaactactattaatttttttattctcgataatgaactcactccgcaaacgaaacacgctgtttccaagcgcgtcccacgacccaatcaagttgagtttattgcacttaataagcagctttttgaaaactgtcctgaaagcaaccacatcaacaaaacggcttactaccgcattttagcgccaactcttttgttgcggaaaaaaatcgaacgtgtcttatatttagatgtcgatatcctcgtacaaactgatctcacgccgctatacaatacgcctttgggcacaaatatcgtaggtgccgtgattgatcctggacaagcactcacactgcgacggctcggcatcactccaccacaatcgaataacatctacttcaattcaggggtcatgctaattgatacggttcggtggaatcatgcatccatcacagagcggactttccacttcatcaatcatcatgcggatcgcttacaattccatgatcaagatgcgctaaatgccactttggttggtaaagtgaaactactccatcctaaatggaacgtacaaaactcattgctctttagaaaacatgcgcctatcaacactgaatatgcccatttatttgatgaagcaatcgccaacccggcaattgttcacttcacaacacacgagaaaccttggaacactctaaaaagtcaccccttcttaaaccaatatcaaaaggaactcaaacaattacatgcgcaacaatccgatataatcaacattgtatcggctgtcaattccgatttcatcgaaacgctggcaattctatacgcctcaattcttaatcacaatgactcacatcgacactatgctttttacgtcttagaagaccacctcaccgcacgagataaagcagtcttacagcatgttgtggctcgatttgatgccgacttgacctttgcagaggtcaacgaatctttactggccaatactgttgaaagtgatcggatcttgaaaacggcgtactatcggattctaattcccgacgtgttccctcacctcgatcgtgcactctacatcgattgcgatgcgctatgcctcacagatttagcccggctatgggatatcgacttaggccaatccttcctcgctgcagtagaagatgctgggttccacgaacgcttagaaaaaatggctatcgattaccaaagtccgcgttactttaactccggtgtgatgttactcaatctcaaaaaatggcgtcaacacaatattgtcagccgtgtactcgacttcatcaatcagcaccctgagaaattacgcttccacgatcaagatgctttaaatgcaattttgcatgatcggtggattcaccttcaccctatgtggaatgcccaaacaaacattttgatgaacaccatcacaccaccaactgaacacctcaaaaaacaattcttagaaacccaaaaagaacctgcgcttgttcacttctgtggtcacgaaaagccatggcatgcctcatcttcccatccattcacaccacaatatcgttactaccggcaacggttcttaaaacaaaaaaagcggctcgttcccttcgccaatcgccgttccctttctcaacaaggataactacaaaaaaagcgggtgcttagacaaatttatttttgtctaagcacccgcttttttaattgctaaaaattatctttttattgaccgactaagccatcatgaatcttatctaggttccacttcatcatcgtatagtaagtgtcaccttgcttccctctttgcgcgagtgagtctgtaaaaattttcgcataaattggtaacccagtttcctgagcaactttttccattgatttcggcgaaacagaactctcaacaaacagatgcttaacatctgaatctgcaatttttgcaagaaccgtcttcatctgttcaggtgtgccttgcgactcagtattaatttcccaaatgtaaaccggtgtgacctgataggccttaccaaaatacttaaaggcgccttctgaagtcaccaagacccgctgattagctggaatatcggcgaatttagtttgcgcatcagtatgcaatttgcgcaaacgtgcagtgtagcgatccgcatttttgcggtaatcatcagcgtgcgctggatctttggtctgcagcgctttcgtaatgttttcaacgtattgaataccgttcgccaaatccaaccatgcgtgtggatcgggttctgtttggttagttgtcaaatgttgcacctgaattcctttgctagcagcgaaaacatccttttcgaattgcttatgcgcgatcttaacaagttttctaaaccaaccattgccacccgtttcgagatttaacccgttatgaaaaatcacatccgcatcagtcgcttttgaaatatccgtcggttgcggttcatattcatgcgggtcagttccccgtttcacaatactgtaaagttcaatgtggtcttgaccaacattatggaccatatcttcaagaatcgaattcgtggtcactacacgtaatttagtctgctggttcgtttgttgttgtttagattgggcgcggtgctggatgaaaccatacacaccacccaccaaaccaaaaactgcaattaacgtcacaatcatttttttcatgctggtcgtcctcctttgcgccacttaaggaaaccttgcttaggcgcgcagatgaatgaaatggcaaagagcacggctgccatcagaacaatcgccggaccagatgcccagttcaatgtgtaactgaagtacaatccactgattgctgacacagcaccaatcccagccgataagaagagcatcgtcactaagcgatccgtccataaaaaggcggtggctgctggggtaatcaacatcgcaacgaccaaaataatcccgaccgtttgtagggctgaaaccgtgactaaggttagcaccaacattaaaccgtaatgtagcacctgcgtttttaacccatatgttttcgcataggtttcatcaaacgaggtaatcaataattctttgtagaagaatgagacgaataagatcactaagcctaagacaatcgccgtactcataatgtcgctatcactgacggcgagaatgttcccgaataaaatatgatgtaagttggttgcactttcggccatcgaaatcaggataaacccaagcgcataaaaggcactaaagacgaccccaatcgaagtatccgtcttaattttactatgtgttgcgacaaagccgattaagaccgccgctaaaataccaaatacagatgcgccaaccagcacattaattcccaacatgtacgccactgcgacacccggtaacaccgcatgtgaaatcgcgtcacccatcaacgacatcccgcgcaaaatgatgaaactcccgacaatgccagacatgatgccgaccattacggcggtcagcaacgcactctgcaagaattcataacgacccaacgcactaataaaagctggaatactcgtcattttgccacctcctgtgcatcaaacaagacagcggataagtccgcactaaaagcacgctcaatgttttgcgcattataaactttttcagttggtccataatcgacgatgccgtggttcatcaccactaaatcatcgaaatattgcgatactttattcaaatcgtgatgaatgacaatgattgttttacccgcatcacgccactgtttcatgattgccatgatcgcggtctcactctgtaaatcaatcccaacaaacggttcatctaaaataataatatccgcttcttggacgatggcgcgtgcaacgaaaactcgctgtaattgtccacctgacaactggccaatttggcgttgcgcaaattcgctgagcgatacttgttcaagtgccgcgcgactggcttgttttgcctttttaaccggatcgcggaataagcctaacttgccatacgtgcccgttagcaccacgtcaaaaacgttaattggaaaatttaaatccaaatctttacgctgttcaacgtatgcgacttgcttctgaactgcgcgcattggtcgatcttgatataaaactgagccttgccgtgccttaaccaaccctaatattgctttaatcagagttgatttgcctgcaccgtttggtccaatgatgccagtgattttgcctgcgtcaaactgaacggcaacatcagtaaatactggtgtgtcatcgtaagcaacggtgaggttcttaactgataacataaagagcctccattcttttaggtaaacctaacttttctcactacagcatacatgattttaatggaattaacaaatattttagtttaggctaacttttcgggatttctgtggaacaatggcttaggatgtttcacgtaaaacataataaaagagtcgcgctatttttaaacagcacgactcttgttattaattagaaatcttcgtcagcatcctcatttgaaacagtgtattgataaatccccttttgaccagatgctaatactttatctgttaatgcatccaatcccaagttgtcacggttgatgaataattcaagtaacatcggtaaattaacacctgatacgagtcgatactgtggcgcatcccgaatgatatcaaccatcacattaaaaggtgtcccacctttaatatcagtcaatacaaaaatttcagatagtggttcaaatgatgcaaaacttttattaatttgttggcgtaaagcttctgtcgtttcccccatttcataagaaacaactgctaaatgcacttgttgcccacaaatcatttcagcagcttgaactagacctctaccagcggcaccatgcgtacaaatcacaactccaatcatctctgttcctccagccattttaatatttcaattgacgatagtaacgtctaatttccattggatggcggttcaagtcttcgatgtgcacatcaattcgatcattgaccgcatgcaagataaatggtgataatgcaccgcggaattctggtgaaatccccggcatgtcgtaatctttcgcatcgataaccgtataattagcacagatttgtgggatgaagttagcaacgcgttggctcaattgtcgttgactatcttctgtcacgtaaattgtgactggtgtatcgcgttcaacaatttcgaacatcccgtggaagaattcttgcgcttcaattgattttgttctgagccaatgttgttcttcccaatagcacattgcatatgaatacgtagcaccccattggttaccagccccaacaaaataatgcatttcatcttcgtgatgtttcagtgcaaattctgtagcaaattcgtccgcatttttataaacagccacaacatcttttgcaaagttatcatccatttgtttgtagaattcgtcgtattgatcgaattcccctgctaaatacataaagcgatcacctaccatgaagaacttaagttgttcattcaatgggtatgaaattaaataatcacacatcgttgctaaatcggcatctacacgatcaacaaacccaattacacgtgcaccaatttcattacatttcttgacagcttcgaccatttcttgcgtatttccagtaactgaagagataatcacaaccgtgtcttttgtcactcggagattgccagttgttaagaacgaagctgcgttttcgtagaatgtttcaatttttgttctttctttcatgtgaacgaccgcttgcatggatgatgcataagtgccaccgatcccaatccaacaaatattactataaccctcatcattaatttgatcgacaattttattaatgtctgatctgagtgcaattccgccttctaagtttgccaataattctttttcgttaaatttcaacatctcaatttccttctttcaattttttatatttttgaatttgtaattgggtcaaaatctggaaaagctgacacttttagattaatttgcttgcgcgctgatgcggtataagccaataagtgaattggaatagtcataaagagtggggctaacaactcatcagttggtaacgctaagccgaggtcgtcttgacgatcaacttggccattcgtaattcggacaaccttcgccactttgccggttaaaaattgttgtaacttagcgactcgctcttgtaacttcccgtttggttcaatgaaaatcacatgatcacttgcgtggagtccaatataagggccgtgcatatactcttcaacttccttaccgagtgcggtaatacgcactgtttctgtaatcttagtttcaccttcacgggccacaccgtatgtgccaccataaccaacaaagattacgcgttgtactgtatcaaacacatcgctataatgcgctacccattctttagcagcatcaatgatgcgtggtaggtcagtcacaatgttttcaatcgctgccaaattcgtttgataactcgcttgatcctgtttacccaattcaagcgccaacaacattaatgtcaaaatcgtggcactatagccagcggtcacatagggcatctcttcaattggcatccctagtggaatcacatgctgacttagcttggcaatcggactgttttcatcaccagtgatggtataaatccggccgttgattgcttgaacccgtttgaccatctcaatcgttgagtagctatgcccaccctgggaaatggcgatatacaacgtatccggttgcaggtgcaacatatagttcgccgtaaaagatggctcctcgacaaaaacaggaatgcccaattgctggctcatataaggctgtgccgcaaacgccgcatttgaactcgatccagttgcaaaaatcacaacatttttatatgccgttgatttgtcattcagtaacgtacgcaatatcgtttgccgattggctaatatatcagcatagattttcggttctgcttcaatgtaatgcaacatatcctgcatgcttgctgcctcctacttcagtagacctgtgtaagcaccaaagattccaattactgcaattaataatagaatccagtgtgctttcaagccttttttatctaaccagaaaataaagagcgtaaagagtaatggcaagatgcctggtacaatcccatcaaaaatactttgaacagtcggcgcacctttacccgcaccaatcgtcaatggcatcttcagcgtcaccattgtcgccaccatcgatccaacaacgcccagccctaagacggaagcgccaaaggagagtttatccattaaacccgttttttgaactttttcgatgaagcccgcaccgatattgtagccaatgaataacccgtaataccgtgctaaaacagccggaatattgaagattaacaggaataacagcggccctagcagattcccttgaagcgctaaggaagtcccaattcctgtcgcaattacccgcaacgtcccccagaagaaggaatcccctaagccacttagcggacccattaacgcaatcttgatattgttaattgcatctgtgtcaaaattttcatctaatgccgcttgttcttccattgctaccgaaatccctaatggaaatgtagaaagccacggcgttacattataaaattccaaatgtcgtttataggcgctcgttaatttttctttactgcctttatagattttatttaacgctggtgtcattgcaaacgagtagcctaaatttgattgtcgttcataattccaggcccattccatcgtgaaggagcgccagaaaaccttcatcaaatcttttttcgagattaaactagaattcttcatcttcataatcgatgcctccattcgttgtacttgcagcaactgtctcgcctttatgtccattattgaaagctgagtagccagttaataccaatgcaagacaagccccaaagatggcaaccccagtaacagggactttcatataaaccgctaaggcaaatcctaatacaaagtaaattgcattgtgtttattgaccattaatttcaacaataacgcaaacccataagctggtaataagccggtcgcaattcctaaaccatcgatgacaaattttggaataaccgctaataatgacttaattactggactcccaacgatgaaagaaattgcaacgattaagccgattggtaaattgattgagaagaacccaccgaacaattgcatccgatccatgccctttgaattaccctcggccgcgtatttatctgccttatgaacaaagtatggcagaacaaagatgaagcacagattcttaataactagcactaacgatgcaatcggaatgcccaatgttaacgcaacggctgtactcttaccggcaccaatggcaaaggccgttcctaaaatactacctgaaataatttctggtggaatcgaagccccgattgaaaatgaccccacaaaggccagttctaaggttgcccccatgataattccggttttcatatcacccataattaatccagcaatggtacacgtcacaagtggtcgcgataacattgatgatccaaataaatattcagcattcgccaacatcgctgttaacgctaataatatggcaatcaatatatggttcatgagtttatcctccttttattctggtagtatcattttcttttcattcggtacttgttggataaagacgtctacaccagatttagaaagcgcttttaattgatcgacttctaaatcggttaagttaaccgccttagaataattcttcgttccttctcgttgttttgtgcccccaacgtttaacaatgtaatcttatcgcccgttcctttgattaatttctccgcatccgctactgattcaacaacaattaacaacttatatttatcggttgcgccagaattaatagcactaatactgtcatcaattgatttcatcactaacttcgcttgttctggcttcgccaagcgaattgctgatttacgaaagtcatcccccgccacactatcattagccactaaaatcgtattaacatctaattcgttaaaccaagaaactgcaacctgtccatgtaataaacggtgatcaattcttaaaaattctatcatgtgaagtcccccttaattaaaatcaatattaaattctgttgtatcagctggttcatagcgattcgaaatcccaatcactttatgattttcagcgtaatactgactgctcaatttaaagagcaacgcatcttcttctagatctaaatatttagcatgcgttgatgccatgctgacgagctgtaaatcttgctgcattccgtagaaattttccttagccgaattgacaagttcgatagtattgaccatctggatatccgcaagactcaaagtcggatataactgctgcggtaaaataatcgtttcgtaaacctgattctttttttcttgataaacatgtttgatggtatacaacaacgcgttgtcactgatatcaaataattccccataatatttatccgctttgcgaagatgaaattctttaatctgttttgctgcgttgcctaagttattattcttcatcacccccgtcatttctaaaatattttgcgaggaaatctggggtttaacgtatacccctacaccgtttttcttgataattagttctttagcaactaaattatctaaggctttccgaattgttgtccgacttgcaccaaataattgctgtaattcagcttcacttggcatcaacatcccacttttaaattcgctacgctgaatgcgagtttcgatttcgtctgaaatggtttcaaataagtattgtttcatcacaaatcaccatcctcacgataatcaaaaatatttttcgcatctaatcggtaacgaatttgattcccaatcagatactggacactatattcaaccggctcatcatcatgatcgtaagccaagcttgttacaatatataatggtgtcttctctggtatttctaatatgatagcctgtttcttatcggcatatcctgctttaatcgtttcatgcccgtagcctaagaccaccccatattgatccttcagtgtttgataaagggaccgattctgaaaagagatctgctcaatttctggaaagcgttcttgacttaaaaaagctaattcgtacgaaatgggtttcccattaatcattcgtttccgcggtagttcaaatacatgatctgccttcaaaaatcgaacaacatcttcttcgactggttcttcggtttgtaagacctcggtttgaatttcgtctggatttaactccgttgacattgaactcattgccagcatgttaatcacatgcttattgttaactgtcattcccacacgtggctttttttcaattagtccttcattttggaggactgataacgagcgccgcattgctgttcgactgataccatatcgctcagccaattctctttccgaaagattagcgaaggctcctttttggatatcgtatcgcaatcgttcctcacccaatgttgcaggtgagatttctttatattccaaagcgatccttcctttcaaattttaaagattaataactcttacaacctaattcactaaattaaaagatatagttttttatatttttaataccaaagtcattgtaagcgcttttttattttgtgtcaatcgttttgaaaaagtttttttaattggcatccattagttgattttgagtattggaaaatgacgttctagataaccagtgcattttaaagtttctaataatttattctcattattgcacattaaatttaatgaatatatttcgtaattggcttaaaaacccgttaaatcggctttaataaggatttttaaagaactacttctctttaacaactacatgcaacagatttgcatatcgataaaaaacttgctaatattaactattatcggtaatgttgttaaatatgtatattaataaccattaattcaaaaacaatattaaccgtagattgtcggccatcactcgtcacataaaggagcgcgagacagttcttaaccgaataatgctaaaaatagtttctgttaggagtgctacctatgaaagatttctttttatccactaagtcaattacgttaatccgtatattagatcatattatccaagccaatgaagcacccatgcttcgggatattatgtatcatttctcactttctaaattaactgcaatttgctacttaaaagagttgcaactagaccttgctgaattagacgccaatattcagctaacaacagtcaataaccgctatgaactcgattatcctgaaggaatgtcttctaacgcgattctttttgaacttcggttcgcttacattattcgaacaaccagctttcaagtgatggacgcgctttttaaacatcattacaattcggttcaaaccttggcagaagcaacaaatttttcgacctcatcagtgcaaaattgtattaaacaattatgcgtctatttcaacaccttctacgtcaccatttcatttagaggtaagcaaaacatcgttggcgatccgttaaacattcgcttgttgatgatttatacttatacatctatttatcgcggtagtgtgactcaggacttcatgacgacacgttcccagtatccaaccgcgcttaaaccacatttaagtttttcgcagcatcatcagattgaagcactggaatcggtcacttattttgatctcattcaaaagaagtattcgatcaccttaaaccctgaacttcaccaactatttgaagcaattaacaagactaatacgattacccttgaattaccaggcttacctgaacagactttgcttgatgaatcactgctgtttagctttttattgcgcattgccgttgctaattacgatacagacaccgaaaaaatcaaaattactgaggctattttggcattaaatactgattttacaaacgatgttaatcacctactattggacttctttgaaacctatcagctgaactacactaaaactagttttctgatttccttttattatttagtcattaccttcatttatctcacctatattactttcgatatcaccgactttgtgatgtttaatgacacggcctcaacgttcaaacaaatcgatattgattcttatcaagaaattgatcatttaaatcaatttttagctgaaaagaaggctcattacacaacattaccagcgaattcaacgggcactctattaagcgaaatgttcttctttttgctcgactacaatccccaaatcaaacccttaaaaattaatatccgatacactaaaaatttctatgcagcgacgatgattaccaaaaatctacaaaatgtgttcaggtcttcaattgtgttcactgattagatcgaagacgcagacctcatcatctctgatcactacgaacatgacgagtctttaaacggacaattcttcttattcagaaataatttcgaaccagacgattgatccttattactgaagaacgtattagcgtatatttatacgaattcttttcataaacgactgaattaaaaaccaccgtactgctaaacagtacggtagtttttgcgttattgattttcaagttgttcttgcaaccattccagattaacttcatgatgccgtttagaattagtcatcatcttgataaacatcggttgcaagtcagccggattggctagtgccgcgtcaatcgcacggattttagcctgtgtctgttcgatttggctttttaacagcttatccatctgttccggtgtcacttgatccgtgaataatagtggtgtgtagaacggaaacgtaatcggcttattctggcgaccataatgggcaaattgttgctcaaaagccgttatgccagcggccgttaattgatagcgattcttttcccgcttatcgggcacgtcgtccgcgactttttcgatcagtgccttttctgccagctgctgcaagttatagtaaaacgagcccttcgtgaagttcacgaaaaaagcgtagtattggctttccatgtcagccaataattcgtaaccatacgcgcccggctttttctttagtaatcccagaattaaaaattgaatcatttactagtctccttgcccgttagctgtgcaataaagtcggcataactcatttgaccaaatgcaaaatcacgactcaatcggtacatcttttcctgctgtgattctgggcgttgatagagttggtctagttgaaccgcttcatctgcaaggacgtcaggaacatcttgatgctgttcgaaagcttggaaataacgaatcccaaaacgccgttgcgaggccgcgtcaatgtgaatcccatctgggttagccgttaattcggcagcgttgaccaaataactgtgtggatcttgcgcgacaacttgcgccatttcgcgattaatttcgttaaattccgtggcgctcgcgccgaaccctactttgcctaaaaaggctggcaattgacccgcaatgattggtaaatcaggttggcccaatgctgcacgtaaatgattgaagaccgccgtcaacttggtcgcatacgtttgatagccaccatttaaactgtcactttcaccttgatgccataacaccccgattaactcactagattcctgtgcaaatttcgcctcagtaatcgcgtgacgcatcaaaagttcgtcgctcgcccactcatcgatggtgctcccaccttccgcgcaggggattaaccccaattcttcatcaggatgagcttgcacccacgccgcagcaaatgacgcagccggcccaacacccgcaacctcccgatcaaaatgaatcggttcggccatcatttgccagcgcccattgcgcagcatcttcacgcgctcgtgccgcaatcccggcacatcttgaataaatccccgcccagccatattcgactgaccgactaataaaattgacttcatcataaaaatcctcctgaaactgatttttatagtacagtctaattagactatgaattcaaaaaattctaggtaactaataacttagttacctagaatctaaataaaaattaaattactctgacaattctgggtgatcatttaaaaattgtgctattggtctcaaaatagttcttgccaattgaactggaacagcattaccaatttgtttatattgtaaattaagtctattatttttttgtactgtactcttccctccatcactaaatgagaaccaatcgggaaacgtctgtatacgcgctacttcccttacactcagtcttctgtttatttcccctgaaaacctccataaatctttttctaccttaaccataggtttcccaccaggccacataggtgcctgtctgccactggcctgaatagtaaaggactgttcatcccaacctttcttcctattacgagacatatacattgatgaaaaaccaccatcatatacatcttctggatctgttggtaaatcccctattgcatcacgtaacgtaacaaacggaatcttattctctccatgagttgggtctggaagattgtagctccagtcatagttgtctttaattttatctttatgcgtgccgattaaaataactcgttctcttaattgtggtacaccataatctcttgaatttacaagatgagcttgtacatcatatcctgcagatgcaaaatcctggactacctgtctaaatacttcaccttttgctagagtcatcagccctttcacattttcggctacaaaaaattctggctgcgtttctaataatgcacgaataaaatgtacatataagaaattccttggatcatcaattaatcgcggtcctgctgcactaaatccaggacacggaaatcctccgaccattatttgacaattaggaaaatttgaaacctgacgtatgtctttactgtgtttaaagataccttcttgaaaattctgaatatatgtttcgtttgcttcagtaaatagatcatttgaatacaccgtattaaaaatactatctttacgaatatcttcaaatgaatttctttctttaagtgcttcatcaacacttatactacctttattaacatctaaaccagcaagttccaatcctaaatccagaccaccagctcccgagaatagactaactacattgaatttcctattcattaatctaatgttctttattagatcatcctcatcgctacttatttgtattttttcacgttcttcattaattttattcaataaaatacttctcacttcatcaggatctaatgttgctgcagatataaacgtactcatacttcagtcctccatatagttcgttattttatggtaacatattatatttaacttggccagttctaatatttgttacataatgtacaggacaatacttttattaataaggggttaattatggcaaatcaatcgttgaatggaaaagctttcgaattcgcatgtctctctgctctaataaaatttatagaacaacctataataattgataaaaccgcacctgcatacatcactgtagaaaaagacttcaattccctttcttccgacgatcaaaaaacaatgattacagctgctaaaaaaggtattcaacaggttatagattatgaaccaaatttatctatagaaaccacacctctacatttatatatccaaactgatagcaaggggaagactggagatgtaagagatattgtttgtataaagcccgaggagaattggcaaattggtatctcttgtaaaaataatcatcatgccgttaaacattctagactatcaccaaaaattgattttggaaaatcttggatgaatgttaaaaatacagatcagtatcgtacagatacactacctgtatggaactttttgaaaaacactatcgaagaaaacccagatacaaaatggtctgaccttaaagaatataaagagacattagtttacgcccctctcctagaggcgttctctaatgaattacggattctatgtaaagatacgcaaaatatcaagaatcttttctattatctattgggttcttatgacttctataaagtaatagccaataaaacaaataaaaatacagaagtaatgatatttaacttatacggtactttgaataaaagcgttaacggcataaaaccaaaacggaaagttcataaaacattactaccttctcgattgtattccatagaacccgcccaagataaaaagggagtcagcccaacaaccatcaaggctgtttttgatgactggagtttaagttttagaatccacaacgcccggactttagtggaaaattcattaaaattcgatattaatttaaaatcagttcctactgatcttcaaaatatcatctctccttgggaataactcattaagcaaacgtcttcatacacataattgatgtataattctaccatcatcttgtcttaactcactttgctcctatcctagtatttggtacataaatttctgaacagttgtgccataattaataaaacaagataggagcattccaatgaaacgatatcaagatgattttaaagccagcattgtgaagatgcatcgtgaagagaaaagatctattcgctcgctttccgaggaatacggtgtttctccagccgcaattcataactgggttaaaggcgctaaatcagttgagctagaagacggtactgaagtaacgtccaaagaattcaaacaacttcaaaaggaaaatcagcgattaaaggaggaacttgaaattttaaaagctgcggcggtgttactgggaaagcattaggacgaattaattgccttgtcttcatagaagatcagttattgcgacaccgcttatcaattattctttcggcactgaaattaccgcgcagcacctattaccattggaaaagatatcaacctagtcaacacgaacgtgttgataatcagctcaaagaaaaaattaaattgatttgggaaaataattatcgtgcctatggttatccacgaataacgatggtgcttcgcaagtcaggcatctgtgttgggtcaaaacgaattttacgattaatgagggaaatggagattcactctttaatgaatcggcgatttaaaaaacctggcactcatgtggatcattcacaacgccccaatttaatcaagcaccagcccaatgcaaggatatggcgtgctgacattacttatttggaattacgtccaggaacctgggtttatctcagttctatttacgaaccaaaggttcatcaagttcttgctttcaagattggtcgtcagatggaggcgacgttagttgtagaaacgattaatcaggcgcttgaatgtcatcaaaagccacaatattttcactctgacatgggttcacagtacaccagcaacgaagttgaaactttacttgaacggcatcagattagccactcatactcaaaacaaggttatccttatgataatgggccaattgaagcttttcactcattgttgaagagagagtttgcctttcaaacaactttttccaattttgaggacttggtaatccgaacctcaaattacatcagttggtttaattccgacagaattagaacgagtgtttagaaaaagatgtgccatttattgacataggagcactttatattatctttcatcggtacaatactaatatgatacttatactttcatctggtatgtgctaaaccgctgtcgcattttactttagacatgataaaaattcctttcgcttttagatttggttagtaaccattctctagtatcgcgaaaggaatttttacgttacagcgtattctaactcccacacctaaaagcaattcaatctttgtatgtccatcctctgtattatataaatgaggctcctatgtcaagaatccggacataaaagtacgaacaaatttgactttcaatttaaattacttaatttaattttcggagcccgaagttttagccccgttcagattttaaaaacgctttagagtatattaaataagccccaacattattgaatttaatagcctgtagctacgctacaagtgaaatacgatcactgttataccaacgaatatagttatcaattccggcgattgcttcatgaattgtcttaaaatcttggaaattaacgtattcacgtttcaaaattgaatgaaaactttcaattcgcgcgttatcgccgggctgaccctttcgggagtaagaatgcttgataccatacttcgataaagtgttttcaaataagtcacttgtgtattggcttcccatatcactatgaataatttgtggtttaactgcttgcgccatgacttgggtaataacgttagtcgctagttctttagtcatctgcgtattaagttggtaagcaataacccgtcgggttactggattatagacactagctaggtaacaccaagtatggttaagggaaatgtacgtaatatcagtcaataaaataccagattgatcagttaactgcttaatcaagtttggtcgctgatcataatcagtctgagtggttggcttattgattcgtttaaccattctagatctaatccctaattcacacatttgttgatagatcagacgctgactaacgtgaatatcagactgttgatttagtaagatcgttaatcgtgggtagccatacattggatatcttaaccaagccgttaacacttcttgtttaattaaatgccggcggcgttcagttctacttggctgccaatgtagataatcatagtaggttgagcgcggaattttgagtactgataagatacgcgtaatgcggtgcccagcaagtaaattagcgttgacgacttctaacacgagggcacgccctttaataattagctttttgccatgagcaccgccgctcgttttaaaatatcaagttcttcttttaaccgtttattttctttaatcagagcacgttcatttgatgatagcactttagtgttgttaggatcagcttgtttaatccacttagtgaccgttgaaacactgacgttgtattctttagccagtgagttggccgaacggccagtctgacttaagctaacaatcgattctttaaattcatttgaatatttaattgccataataaaaagctcctttatgatgtattatatcgaacagtttgtccgtaattccatcataggagccctatgaaaaaggcattaccactagagaaattgccgatttaattgaaaagatgtatggttcacactatagtcctacgaccatttctaacattacaaaaatggttgatgaacaagtgactgcttttcattcccgtcctatttttcattcacaatatgtttgtctttttctagatgctacatatattcccttaagacgtgacgctgtccagaaagaagcggtacatattgctttagggattacttcttctggagaaaaagaaattttagattatcttattgccccacaagaatcagatgctgcttggtccgatttattaggcagtcttgtttctagaggactaactgatgtgcaacttatcgttgccgatggcatgaccgctattcaaaatgcttgcgaaagaaattatccccaagctaaatttcaacgatgtcttgtgcacattaaccgaaacattatgggaaaggttcgcgtttctgatcgtaaagaagtagccagtgatttcaaaggaattcatcatgcgatcaattttaaagagggtgaagaaaaaatccaaacctttatagaaaaatgggagaaacgttatccaagaatgacgcactctcttcaaaacacagaaaatctcctgatcttcacgcaatttcccaaagctattcgaggtactatttattccaccaacattattgaatctttcaataaacagttgaaaagaaaaacaaaaatcaaagaacaatttcctaatgaagaagctcttgatcgttttttagtcacccaaatggttgattataataataaaaaaactggtagagcccataaaggttttaaacaatgccaggacacattggattcaatgttttaaaaatataaatcaaactgaataaggtttaaatgaatttacacaaacttcttgacacaccctagataacataataagcggagaagaatcaactcatgaacaataacaaacaaagtagcttttttgatggtattggtttaggcattaatttaataatagcaggaatatttcttccgctactatttcataaggcaaattacaagtttaatccgaacaagcccggaatctttcaatggcagtctgttgatgatgtatttttaatggtcgttgattaattagttcaagtgctgctaggatctcatcagtcgttacttggctaaaattggtctttttcgggaagaaccagcgtaaccgtctactaaaatattcattggaacctcgctcccatggtgaatatggatggcaaaaataaactttgatctgataatcctgttctaaggcctgataattggcaaactctttaccatgatcaacagtaatggattttacttggggaccgaaggcccccataaacttaccaaaggcggtgtttagagccttagccgttctattaggggctttgatggcccatagaagtcgggtcttacgttctacgaatgtaaccagacatgatcgtgactcacttcgactagaaagcaccgtatctacttcccaatgaccaaaagctaaccgttgattaacagttgttggccgttgttcgatggaagtcccacttgtaaatttcccacgattttcgctcactcggtgctggcggacattccgattgggtagatcagtcaatttgaaggggagccagccacgattaagccaattataaattgacgcagtgctcaagttataagcgaccgcaatggtttctggtgaccaggttaatcgtaagtgattggtaattaaagtcgctaatgctgccgtcagcatcgaacgacgaccgcaattccgccttttgcgatctgcatcttgctgagctaattctggatcataaggtttaactcggtccaactcatagctaatcgtagctttggcgacgcctaaggcgtcagccattacttggtaagatttattcccctcattgaccagttgtactagtgcgccacgttgaaaacgtgataaagtagatgtacccaaagtaatcactccctatattggttggaattagctactaccattgtaagtgattgctttgggctttttaatttctgttcggattaattatagaatttgccaacaccaaaaattctagacccaaataaatttacctacgggttatttatcaattaactttgatagataataacccgtaaattgcaagaacaagttagccagtcgttgaggacaatcccagaacaggccgttatcaaatagaagttgtggcgctagagagactactgggccatgcggcgaacgtgccgagcttcggcctcaaagttttgctggggtgtgcagtagccctgttgtttgcgaggcaactgattcaagcggtcttgcgtggcctgcacttgactagggctaatgtcatctagggacatgcccttagggaagtcctggcggatcatccggttatgtgcctcgttggtgccacggtcgcaggacgtgtaaggatgggcgtagaagatctcagtttccgtcccagcaaaagcagtatttaaggcggtgaactcgggtccgttgtcggctgtgatggtcttgatgcaagctccccattcgcgcttgattccacccacgcaatgcatagctcacagagtctgcatctcgtccttcgatcaagcggagaagttggcaacgggtcttgcgctcaatcagagtcaagatgacgctctccttgccattgcgtttaccgacaatggtatccatctcccagtgaccgaactgcctgcgtcgttcaacgaccttaggccgttcctcgatactgcggccagccaggtgcttagccttggtgtggtgctggtgagaggtcttccgcttagtcttctccaacaggtcgatatttcgaatctctaggcgttggtcgtcaatgtactggtacaaagtcgaggcacaaacaagctcttcaggagtaaacagcttgtgtcgcttggcatagccgattgaagcatccggggaccatttgtcctgcttagctcgctgtacgtaccaggctaagaagacctgtacgctggcgaacttgtcaggacgatggcagctcaagcgtgcagtctcgtaaagtgcctgagcagcctctggcaggtattgtcgatggtagacgcgcttgccattactcttcttgacctgatctactgtacctcgcttgatttcattattaatggtctgcgggcagacgccaatttcagcagcaatccaacgattggacttcccagcttggcggaatccggccacttttccgcgctcgagtgatgttaagtgctgacctttttggcggtgtgtgctatcctgtttctgcatcaagacaatatcctcttccattgtttgtgtaggaacttcaatgatacaggatatctgttcttgatgttttttattgtccaaaaaattttgagacagtggctaacttgattctaaaatgcgcggtttaaaacggaatatcttcgtttaggtcaattacatattgagataacagtttaattacttcaattttactcttagttttatgttgctttatcaaatttgaaaagagttcatcacgtaaaatcataaagccctgattagcatattccgaaagcatctctttaacttgtttttgaactttattatcagcaaattttccttcttcaccatccaatataccttctttgatagcaagtgcatattgaatcccaagatcagatttattcttaaaatatgattgtctgaactgtcgaccattaccatcagaagccggtaactttatacctgacttcataccaatagttagaccaagcataaagatctgtgaaatctttaagtctaaactatcatgcagtaaatcaaaaacgtcttcaaactctttgggtgtatgaatcaaatcatcgacatttaagaaatttaaattttccattacctatacctcctttaattcactaaatgaatcaattgcacgaatcacacttttgccatcttgatctttggtgatacggtaaattttactaactttatcttcactagcaaataaattcatttcattttcacctaattcagtatctgtcaataacaatatccattgccgcgcaaatttaggagtctctctaatcatatttgtccgaacaatactatctaggcgtgcaaacggtgtatctactaaaagtggaaaatcaatgtcagatcgtcctcgagaagacaaatctgctaatgcaaaaataaaagacaatgacagtgcttgcttttgccccatcgaaagatcacctaacacattaacatcatcatcatttaacaacgtaagatcatatgttgttgaaatatctaatttctgcaccaagttacggtctatattagaaagcagtttcttaagcatatcaaggattctttctgataattcggttcgcatattagaatcataagcatgtaaaatacgtgttaaaccatctaaaattctttccgttctcttaaatactttttcctttaacatatcttcattaacaagatctatttgtcttttctcgtctttatccaactgctcttgttcactttctaaattgttcagttggaatttaagctcattaatctgtgtatttatggcatctaatttccggttaattgttggaagactatttacttttttatcttcaacattttgaatagccgctaaatgaccagacagagattcattcattttatcgatttgcagcatcaactgttctttcttttttgacgcctcgataagcgttttatatttctcttttagtaaatcagtgacttcactattttctttaacgtgttcattcgcaatctcaatatcttggaatacatccctaatattagactgatgataattatccaataattgcttaacatgtatttcattctctggatgatcacttaagtcattaccgcataataaacagctaccctgctgcaatgacatttcaataatccttttatcaaacttactgtcattttgttcttgaataatactaactttaggcattaccaaattcatagtgtcattccataaaaaactcacgccatcaaataacagacttttcatattgtcactaatctcatcaattaatcgatcttgattaattagttcttcttcatacctatttagctgttttttttgactacttaattgttcagtattagcaatctctaactcaattgcattcttttcatctccagctaatctaagttcctgacttacttcttttaatttattattgactgtatcaatttctgccaagttggactgctttttactttgaatttgatttaattgcaaatctttagattgatgcgcaatctcatttttttgctgcttaatcagttgttttaaaatatcctctgctttttgtacactctttatctgcaatagattttgcacgctatttttaatcttttcagagacttctgccttattcgatgaatccggaaataactgggattgctctgcgtcaaaaaagaaaaagtttctaacataatcgggcatgatcatatttaattctgaattaacttcctcaacattattagagatttgctcagtttcaccgctagaggttctcttagataatgttgctcttgagctcaattccttaatattatcgccatcagcaatttcaatcttttctcgatgaatctgatacataacgccttcgtgttcaaaacaaacttcgacttctgcggtaactggatcaccatcattttcacgtaagcgatctaagttaactaaatgaacagcttcatgccggctctgattatcttgatctaatttttcgtccccaaagagaccaaacctaattgctctaaaaatacctgttttcccagcgccattgacaccaataatcaatgtaacgttttgatcattttttgcaaacgtaaccatttgaggatcataaaactgcctaaagttttttaattgtaaactagtaatttgcatagtctgactcccccgtattcaagtcttcttgaacaatttggattattttattacttatatgatcacgtatttgtttattattaatattcttgttttctatttcacttaataattgtttaatcacaacctgatctgattcaggtaggctattaatctgagtttgcaaatctgtttgtatcattaatttatttctcctcattttgaatattttcattataaatatcgattgcggatttatccatatacgaatctaaatcaaatttggataaaatcgggccaacaatatttcttgcctcaaactcatttttggcatattgacaaaattcgtgaaacctaggtatttctctcttcaccataactttagcagtatcaaagtctatttcgttaacatcgggtaatacaataaaatcatagatatttgcttgcgttttaccagctgagttccgtaaaattcttcctcgacgttgaataaattggcgaggattggtagtactggctaaaaaatacgcttgacgagtctgtggaacgtcaactccttcatccaagcacttcattgctgctaaggtttttatttcaccgagttcaaacttatttaaaatttgagttcttttttttaatctaagaccactatcaaatttcacaactgactggtttaatttatttccgattagttgggtatatttatcaatttgaccatccggacagtacaataagttatatttatcattgtttttattaaaaactttttgtaatccaatttccttatttgccgcctgctgaataacccgtgttcgcttcctgagtaaatattcatatttttctctaattgaatcatcatcattctttaagagctgaccataaattttaccaatacttttagtcaaagtgatatactcttcgttttcttctatcgttaggtatacaggaatggggtaataattatatggtgttagaaagccacgatcaattgcttgtgccaacgaaaattcatagataattccaccgaacaaattaaatattcgattagtcccttcctcatcccaccagcgttctggtgttgcagagagcccaagcacgctaccaaagctcgaatataccgagataatattaattgaacttcgagatcctaaataatggcactcatcagcaattagaaatacatcctcagtacgctttagcaatttaattaaattattaaattcccacttattggtactaacatatgaaccgataattactaatctatctcgtaatccatggttatattcccatatctgatcttgaagcttttgcatccaattagttttattacccgcaattttcacatcgacatgcacgccggttgcagtcagattctcctgccactgaggaattaaatgaataaatggtactaagataattagtacctggtgtttaaccatttgaaaattggcttctgcacaagcaatgctagtaaatgttttccccgttccggttgccatatctaaaatgccacgattgttgtgactttgaaacgcctgaattgcttttttctggtaatctcttaattcaatcatcataatttttcttcatctgaacagcaccaaactcatttacaataaagagagtgtttaagacttgtggaatactagtagcttgtgcattctgtaatatcccaattttattgagataagctaaaacgtccttaactgatcccccaccttgatactttttcatcatggctcttgttaaatccacaatgtctattatttcagattcataaggaacgataataagcgggtcattaggagtctcaagactaccattgtcaacgtcccattctagtaatcgatacttattcgaatatctgatttcattttttagtaattctttagtccacgaaagtttaaaggatcgttcaggtaaacttggtagattatttgtattgagcattatcattaccaaactgataaactcactatcaatacttttggttgaccaaatattttctatatactgattagtaccatctataacttgtctagactgttgccaattaataatatatttagttaatataaatacatccatatcgacttctgtcatatcattatttcctagcaactgattaatttttgcataaattgattgattaagatagcctactgaattgagaaaattggttaattctattcgagtaaatgtcctttccccagcccagtcatcgattattttttcatttgtaggccttgatttaacatacttaacttgagtgaatccttttagatttggccataaatatgttaataaatcggcaaaatagtctaactctgaaaagtaaacggctatccccttagtagctaatagatcattaaaaaaactagatttttccatgttatcttttatttcatgtggaaaaacatatccttcgtgtaattcaaactgtctttctatttcattatcaaaaagttgtcgaacttcttttgaaattttgatttctatcaaagatatctttttatttcgcatccctaataattttgagttacttacttcatgattcacactactcaatgggattccaatatcagaagatattttttctgctgaaactatctttccatgtttttgaacataattaataattctttgttcaatagttgctttctcagtattcggtaatctaattgactgagtgttcacatatccaaaactaaactcatcgggtagtaggaagactaattctgagtataattcaaacttatttctaatgcccgctttaattaattcatcttcaaacttcttatatacgacttctggtctaatttcttcaatatctataagtctattatttatccattgagtcattttcgttaaaagttgttggtcaattttatcatgattggaaatagcatacgtataatttcctaaatatactatttctcccttatcacacaaacgattcaatcttgaattgaacgctcgaacctcatcagtcaagttatcacgcaatatctttttatgaaatgtatgttggatataagtatttaagtaattaattgattcagtattgacctgcagagtgctatcaggttgtttgttaatacattttataatggcttgctcaattgatatctgcttataaaggaaaagactgttttcgtactgaaaatcatacgtcaacctaattttattcaataacaatttaagctcttcctcgtttagaaaaggttcgaagatggtccttatctctttaacagaaataacatcaatactagttaatttctcatcaagttttattaatgtttttctgataggttgctcatcatttaatggcggcaataaaactggtaatttcccaataatacttggtgaatcaatatcatagaggtattgataatcttcactactcatatcttgttgtaatatcaatactctgccaacaaagttagtaaaacagatatattcccgcaatcgatatcgattaccaatttcaattttttgattttttattttttgcttaagttgacgaacacgttctcttgtgacacccactttctgacctatggattcaagagtacgatattccttattattttcattatcaattttgtaaacttcattaactcgatcattattattcaagtaatactgaaaagctcgttgacattttgtttttattttatcagtcataacttcaagatagattaactcatttatgatttcctcattaccattatttgcattcttgttaaattcaattttactgtctattactgcatcacgatattcttctaattgaaatgctttaattaaattaattagttctcctcgagtaatattagtttcatgatgctgttctcttttaaaccaatctatatattccttatatccatcggatatcatttgaagaaactctttttgttttcgccctttaatatttttatcctttagtaaactaacaaactgtttattattatttggccatataattccgtctttctctgctttctggtcagaaaaaataatttttaaatattcatgctgcccaaaaagaatatatggaaaaacaacgtgagcaatttcttgctcttgttgttctatcatgatgaatgatgaaaattctgaaagtttagttcttaagtcatctatacgtttaggacctatccctttcaacgtagtaagcttaataattacgtcttcagtaatatttttaatttgaaatacattcatgccacgtaaacttttttttataaaagtaaatttgttttcacttagaaaagtatctaaattgtcatttgaatcacttgatacatcggtttctatattgttattttcaagatagtttttattatcgtaggttataatagaaaatccagcatattgaaataccttttcggcatcaaatagttcttctatgttgttgccaaaaacatacggaatagcatcgatacatataccatcaaaataactatcgctatccacatgagcctcggaaaaaaattgttttaaagcaataggaaagataatactttcatactttttattaccaaaagaacctgattttaacattcttgtttgttgtgggagttgataaaataattgttcaccatgattcccaaaaaaacgcccacctcgaattgttatttcaattttaagtaatgtaaataatgacggatttactttgtaaactcttctcagaaaatctaaatctacaatacttatatggttctgatatgtatataaaacttggtattctgtaataaacttattaattaaaaaacttctacagttctttatatcccctaaaaacaaaattttattataatacatcccattcatccaccattctcactttgaaccaatttgaagcgtttaatacttaaatataattagattatactaatgtaattagtacagatcaattagtatggtagattgcaaatttaatccgaatttttggacaaatttgtcagcataacctgatacggtgtttgccagtcgagtattttaagcggtcgctggttaatttggagtaacgtcgtcgttaaatcttgagcactaatgtgctcaaaacgagtccctttaggataaaaataacgtaaattccgattaaagcgttcattactaccacgttcagctggcgtataagcatggcagtaataggtcttaataccatattgtgattcaagtgatactagcccactaaactcagtgccacggtccacagtaaagctgtgcaccggaccattaaaagtggttaggaacttagttagtgcttcattaacagtcgctgaatcgttctaacgctcaaatgacttaattcagctaatttttcttgtgttaatccttttgactttctaattagtgtaatacgcgtttcgtgactcatacatttttctctctttcactaatgattttataaataatcatagatatatgctaaaagagttaacacgtcagtagtccgacaattaggcgacaggttactgacaataattagttatcatgcagaattctgcccgtctgggataatcttgagacggtttaaccacaataattaatttttgaagtttctgatgaattcaacaatatagtcactaaaacttattattgaaaatccaagcaagagacctaacatagataactcatttgataaaaagatcatactaggcacaataaataaagcgccaatcaaaataacaatattttgtaaattatacttgataagagagttaaatcgaggtgtgtatttttgttcatcgcgcataagttcatcgagtggaatattaaatagattggaaatcataatgatattttctttgtcagggtaacttttattcctttcctcaattttcaagtcaagtgcaacgatgataacgaattcttgatagtggtctaggctgttacgccatgcatcggtagtaatcgcatgggcgaagatagttcagaatacgtctgggacgatggttcagtgcggattggactgcttgaattttaaccagggtaactgctctgagagacttccctttcgggaagaattccctaagcagtccattggcgttctcgtttgtgccacgctcccaaggcgagtacggatgtgcgaagtaaatctgggttccaacaatctctgataacttggcaaactcggaaccattgtcaaaagtgatactctcaaattccttggccccgtagtcgtcgatcgtgtcctgcaaggctttaaggtaggtgcccgcatgatagtcaggaatcttgacgatgatctcagtccggctgtaccgttctgtgagcgtcattaatgctggctcatcagctaagcgaatacctttgaccaagtcgccttcccaatgtcccacgcctgtgcggtcattcacggccgcaggacgcaactcgattgagtcgccgtatatcttcttattcttgcgcttgtgggcgttcttatagcctttgatgcggcgtcgaagcttcttgggaagtgtcatgttgtctagctcaagcagcccggcgtcgatgtagcgatagaagtgtacgaagctatcaacgctgtgtacgcgcggcttacgagtaagctccctggcgagagccttgaagaacgcacggccggtcttaagaaaagcgtagtgaccggttctatcgcgtttacggtcgtgcatggcttgggcagtttccgcaagatagacttgatgcgagtgacgcttcgagtcgagctgagttacagatccacgcgtgatttctcgtgagattgtcgctttactgcgatgaagcttctgtgcaatcacggtcgcggtgtcaccagcagcctgaagggcctgaattgtagcacggtcgctaaaactgagttgttggtaatgcttgtgggtgttagtctgagagtgggtcatgaagattcctgctttcttgtttagctagcactaacaagaataggccttcatggcctttatggtctagtcgtcagggtgttgcacttgaattgtaaactggggaaatactttccaacaccaaaaattctagacccgtttgtttagatagcgatctagcggtgaccatgccaactaatcttgatccggtcaccgccgtcagcttagtcactccagggattgtcgcttacaaaacggtgcgctactttgcggacgtccaggccgaccaaacggtgattgtcaaaggcactggcagcccagtcggcttgttaattattcagttagccaaacgattagatgcccacgttatcgagattgctagtgaccgttatgctaacttgattgcgacactgggagtcggctaattcgtcgactatcagcatcaaaatccagttcacgtgttagccgaccgcggtgacgtcgtaatcaatgtcgctatcgatggcgttggtggcaaagatgacttagcaacggccaaatttgatgcgaccatcgcttcattcgcccgtcacttgccagccaacagtaaatcaattcgtttccaagcaatccaaccgaccgaagtgatttctgatcaagccgccttacaattactattcaagttgctagatactggtcaattgaccacgacgatcgatgaacaactaccgtttaacctcacgggcttcattccaggtcaccaacgactagatgagcctcacgtgggccaagtggtcgtcgcgcgctaaaaaaactgctttcaaaagttatccttttaaaagcagttttttagtcaggtggtcgcttattaagaccatcgcagaattttgagcaacccaattcacactaatcgtaacgattgggtatatttcaaggaccgcctcaattagccaagtcctggatacctatgcgagttggtagacccaagcctcataaggccgtaatttatttggctgctgctcgccataattactaatcaagcatttggccgtgggcgtcagatattgatccagtggtcgggacagtgtctcggctgtgaaattgcaacaaactagccaggtccgcccttcccattgccgtgcatataagaatacctgcggatcatcggcccacaagagctcaaacgaacctaacgtcactaaggggtattgatgtcgtaattgaatcaagtgctgataatagtaccacactgaatccggatcagccaaagctgcggcagcattgatttgacgatagttgggattgaccgtgagccatggcgccgcgtcactaaaacccgcgttaacctccgtgtcccattgcatcggcgttcgcgagttgtcccgagaacgcgccgctaatcgggccatcatatctgccggtgatagcagctggcgctcagtcactaaatcacgataggcattgagcgattcaatatctcggtaactggctagttcagtaaaatgagcgtcagtcatccccagttcctcaccttgataaatatacggggttccctgtaagaggtgtaaacacgttgcgagcattttagccgaacgtacccgatatgctggtcggtcatcaccaaaacgtgagaccgctcgtggcgtatcatgattgttccaaaacaggctgttccaagcccgcccttcaagtccgacttgccagtcactaatgactttctttagcgccactaacggtgtcttacgcgtactccacttaccaagaccatgctgactattatcaagtcgcagatgttgaaattcaaagaccatatctaattcgtgctgatcagcgcccgcatacttcagcgcatccgctggtgtcaccccgtgggtctcaccaaccgtcatgatatcaaactgtgacaacacttcttggttcatttcttgcaagaattcatgaactcgcggtccgttcgttactcgagcatcgccaaactgactgtgcggtttcagtggaccatctggtaatccgggtaacttagagatttggttaatgacgtccattcgaaaaccgtcaacacccttgttcagccaccaggtcatcatcgtataaactgactctcgtaaggtcggattctcccagtttaaatcaggttgttttgttgaaaacgtgtgtaaataatactgctgggtctgctcatcatattgccatgctgagccaccaaaagccgcgtcccaattattgggcgcctttttgccgttacctgagcgccaaaagtagaaatcacgatattgattggtgcggtcctggcgactgcgtttgaaccatggatgctcatcagaggtatggttaacaaccaagtccatgatgatctttaagccccggtcatgggcggcttgcaatagttcatcaaaatcagccatagtgccaaagtcggccgcaatttgttgataatcactaatatcataaccattatcatcgttgggtgaacgataaatgggattgagccaaatgacgtcgattcctaattgctttaagtagtctaggtgggccgtgatcccctttaagtcaccaataccatcatgattggtatcttgaaaactccgtggatagacctgatagacaacggcttgttgccaccacttgattgttgctgccataattacgattaactccttagttacgcggtaaggcccttgatgagcttaactggtaacgtatattttgattccagtgtacaattcgcatcctcaatccgctgcaatagtagagaaaccagtaacgtgctaatatccgctaacggttgttctactgttgttaattcagaatgataatcacgtatgagcgccgtgccatcataaccaacaacgcgtaattgctcaggaaccgttaatgacagttgtcgcgcgacgttgagcactagtaaagcggtcaaatcatcactacaaaaaataccatcatactgatgttgtgtcataatcgtcttaatttccatcatcttcagcgcaggggtcaattcaaacggtaattcatggacatggggtgttagctgttgggcagtcaagtaggcttcatatccttcacggcgaccattcgttggcgaaccagcgtgtgacttaccagtaaaaatagccacgttagtcgcccccgcctgatgcaatgtctgggttgctagccagcccccctggtaattatccgaactaacgatgggaatattgtcggataagtaccggtcaaatgaaataatcggaagaccatattgttgatattcttcaatacctaaattgtgggcaccagcaataatcccgtcgacctgattagccatcaacatttgtaagtagtcgcgttctttttgcggatcatccgcactattacataaaatcaccttataatttttagcaaataagattttttcaatccgggacaccagttcaccaaagaacggattactaatatctgaaaagatgacgccaattaagcgcgtattctttccttgcagtgagcgtgccatattattcggctgataatgcagttctcgcatcgccgcgaaaactttttctttagtctgactactcaggtagccatggttattaataacccgagaaacggttgtcgctgagacccccgctagcttcgcaacatcatttaattttggtttcattgttatcgactccagtatgctctgattggcgccattcccagactttaccggtaactgccgtagtgtcaccttgaacgttaaggcgactcggggtagcgtttaagaagaaacggccggtcatcacggaatagccattatcaatatagcattcaaagactgacacatctatgattagccggatttttatcgtcttatgggccgttaactccacttgacgagtctgaccataatcttcagcaaacgaattccccgtatgccgccgatcaatcataacctgaccatggttggcatcaacagtcacctgcagctggccactttcctgctgatcagcaatgttaaccgtgaccgttttatcagcgggaaccgtcagtaagagttcaaagctgccattcaaagcggccaccgtcgcccgttgttgctcaaagactaggtcatgcgccgtcgtccgcaaatcatccaccgctgccactggattttgatagaggtgcccatctttaagcgttagttccttaactaagctcaaacaatgggcccaattttcacgatcagttggataggaaatttcaggtaacccaatccagctgacggctaacgcgcggccatccggcgcattgattgcctgcgtggcatacacgtcaaagccgtcatccaattgcgtcagggcgtggggttcagtgaattgtgcctgagctaggtccaattgatcggcaactaagtatatgttcggataaatattctgatacgggatcgttgcttgcgataacccttggggacagaacaataagacgggctgttgatcgatccagaccagatttggacactcaatcatataaccccgcgcatttgcgggaacgttcaactcgccttgacacgtccaggtggtcagatcctttgagaaataaaccaagatagcaccgatctcagtagtcgtctgcgcaccgatcagcgcgtagtagccgtggtcagtccggatcaagtccggatcacgaaacgaactcgtgtacccagccggagcatgcgcaattagtggccgggacagctttttaatgtgattatccgtgtccatccaggcacctaattgatacgattcacgttgccagtcggcagtacggacattacccgtatacataataaataactgatcatcaattggtagtgctgtacccgtgtacgcgccgtgtgagtcgtacggcgtatctggtcgaatcgctaagccctcatcatgccaatccaccaagttcttagaggtcacgtgttgccatgacttcagtccgtgtaccggaccgaacggaaagacttggtagaacaggtgccactgaccatcaaagtatgaaaagccacaggggtcatttaacaaacctgatgtaggctgaatatgatgttgcatccgccacttagactggcgtgcctgggcaacgagctgtggtagcttagttgctggccactgttcataaggggtataacgggttttacgattccatatcatgacgatgagctcctttttaacgttcgacttaattgttaccattataaaaccgcttacaccaatatgtcaatcgtttgacatttttatattatattttcatgtcagcgtttcaaattcggctttttaacaagattatcaagcaatccaattttgtatcaaacgcttgacatattttccagacttgttattattgggtctgtaaagcgcttgcattattaaaaataattttagactcagggagtgaattattatgaatcatcaagaagttgccgaccgcgtacttaatgcaattggtaaaaacaacattcaagccgccgcccactgtgcgacacgcctccgtttggtcatcaaggatgaatccaagattgatcaacaagccttagatgacgacgcggacgttaaggggaccttcgaaactaacggccaataccaaatcattattggccctggcgatgtcgataaagtctatgacgccttaatcgccaaaacaggtcttaaagaagcgacccccgatgacatcaaggcagttgccgctgcgggtcaaaagaaaaatccattaatggacttcctcaaagtcttatctgatatttttattccaatcgtccctgcactagttgctgggggtctattaatggcactaaacaacgttttgactgccgagcatctttttatggcgaagtcagttgttgaagtttaccctggcctcaaaggtatcgccgaaatggttaacgcgatggctagtgcgccgtttactttcttgccaatcctcttaggattttcagcaacgaagcgcttcggtggcaacccctatctgggtgctacgatgggcatgatcatggtcttaccatcactagttaacggctatagcgttgcaacgaccatggctgccggcaagatggtttactggaacgtctttggtttacacgttgcacaagcaggctatcaaggccaagtgctccctgttttggccgttgcttatattttggctactttggagaagttcttccacaaacatatcaagggtgcatttgactttacgttcacgccaatgtttgcaattgtcatcactggctttctaactttcacaatcgtcggtcctgtcttacgaacggtgagcgacgcattaactaacggtttagtaggcttatataacatgactggttggattggcatgggcatctttggccttctctactcggccattgtcattactgggctccaccaaaccttcccggctattgaaacccagttattggctaacgtcgccaaaacgggaggttcttttatcttcccagtcgcctcgatggccaacattggacaaggtgccgccactttagctattttctttgccactaagagccaaaagcaaaaagccctgacttcttcagccggggtctcagcgttactcggaattacggaacctgctattttcggggtcaacctcaagatgaaatttccatttgtctttgcagcgattgcctcaggaattgcttcagctttcttaggactattccacgttctgtccgtggcgatgggtcccgcatcagtcatcgggttcatttcgattgcttcaaagtcgattccagcattcatgctcagtgctgtcatctcgttcgtcgtcgcatttattccaacttttatctatgccaaacgaacactcggtgacgatcgtgatcaagtaaaatcactagcaccaacgagtaccgtcatcaatgttaatgatgagattatcagtgcaccagtaacggggactagcgaaagtctcaaacaagttaacgacaaagttttctcagccgaaatcatggggaaaggcgccgcaatcgtgccaagcgctgatcaggtcgtcgcaccagctgacggggtcatcactgtcacttatgatagccatcatgcttatggcatcaaaacaactgctggtgccgaaattctgattcacttaggattagatacggtcaatttaaatggtgaacacttcactactaacgttcagaagggcgataccgttcatcaaggtgatctactcggaacgtttgacgtcgctgccttaaaagctgctaactatgatccaaccgtcatgctagtcgtcacaaatacggccaattacgctaatgttgaacgactcaaagtcacgaatgtccaagctggtgaaccgctcgttgcgttgactgaaccggcagctagctcagttgctgctacaactgtctaaactttattaggagaataaataagactacatttttaactacaggaggcacactatgcttttaggtgcaattgaagctggtggtacaaaatttgtttgtgccacgggcgctgaaaacgggcaagttagcgaccgaatttcgatccccacgacaacccccattgaaaccatgactgcggtagacgactattttacgactcatcccgttgacgcgattggtatcggttcatttggccccatcggcgttaatcccgatgatccgaaatatggttacattaccacgactcccaaacccggctggggtgacttcgactttttaggccatcttaaaagtcgattcaacatcccactctactggaccactgatgttaacgaagccgcttatggcgaatcaatgattggaatcgctaaggacgtccctaacagcatctacatgacgattggtaccggtgttggcgctggcgtcattagtcagaaccacatttttaatggtcgcactcatactgagcttggtcacatgcgactcaaccggttacctggggacgatttcaagtccaactgtccttaccatgacatctgtttagaaggtttagctgctgggccagcagttggaaaacgaacggggaaagctgggaaagatattcccgttgacgatccggtctggccaatcatcgctgactacatcgcacaggcatgtgtcaacctcaccgtcgccttcgcacctgataaaattattcttaacggtggtgttatgaatcaacggcagctctttcccatgattcgtgaaaagtttgccgcctatctaaatggctacgaagaagtcccaccactggatgactatatcgttcccgctggactgggtaacaattctggcattgccggtggcctattgttagctcaggttgctttaaagaacgcttaacaccttgcaaaaaagtccgccgatacgcgtttaaacgtatcagcggacttttagtttacagtcaatttgtcattcggttaatgaatatatacggttaaaacagtgataaggtagattgtaaaattaatccgaacgctgttcggacaaaaaagatcagcttcctttaaaatggtgtttaccacaaacccatcttttaggagctgatcttttgtctagtataacctattccgaacgaattaaaatcgaaaccttttgtgaactagggctgtccaatatccaaatgggcgttcggctgaaccgatcaccgtcaacaatttcttatgaattatctcgatgtcaaccttatcaggctgaattagcacaaacagatgccgaatacaagcgatcacgatgtggtcggaaaactaagctgagcgatgagttaaagcaaaaaattctcaaccatttacgtctaagctggtcaccaggaatgattgctcacgaatttaaactagcgactaaatctatttataattggctaaatcaggggagaattggtttctccttgaatgatctacctgaacatggcgtacgccaacggcgtaacgttgaccaacgatccagatataatcaatctttggggcgatcaattgaacagcgtcccatgatgattaatcaacgtaagcgcatcggcgattttgaactagatacagtcgttggtcctcgtgggcatagtaaggcagttttattaactttaatcgatcgcaaatcacggttcctttgggcataccggttaaaagatcggacgacagcgactgttaatgaagcactaactaagttcctaaccacttttaatggtccggtgcacagctttactgtggaccgtggcactgagtttagtgggctagtatcacttgaatcacaatatggtattaagacctattactgccatgcttatacgccagctgaacgtggtagtaatgaacgctttaatcggaatttacgttatttttatcctaaagggactcgttttgagcacattagtgctcaagatttaacgacgacgttactccaaattaaccagcgaccgcttaaaatactcgactggcaaacaccgtatcaggttatgctgacaaatttgtccaaaaattcggattaaatttgcaatctaccatgtttgctttttaattcgtgtgtgagtggatatttttcattcattgtcaatggccatttggatttcatgtatttcattatgaaatacttacaaaaaagtatagaatctcatcataagagaacaatatctaatttctttgctttttcgtagcgaacttgtaaacaatgtgatctaattaaatttatatattatttataagaataggagtattgaaatggctgaaatgagttttgaacgaattacgttaggtactttattttctgataataaaaatttagctgtgccaacctatcaacgtggttatgcttggacaaatcaggagtgggaagatttttggaacgatttggttgaggtcttagatgagaatgaagatgatcatttcttagggcaagttgtaactaataagcttgatagccgtgactatgtggttgatgggcagcagcgagtgacgacgtcaacaatgtttttagccgtattacgagatagttttaatagtttggattcagaacgagcccgtatgcgtgcgcaagaccttcaaaagaagtatattggtcgccgaggaaactataactttacacaatctgaacaagttgctgaattttttagtcgattgattcaaaatgacgcgttctcttttagcgaggtaaaggggcaagctggccaagacagtgagcacaattttgtgaaagcttacgattatttgtacaagcgtgtgggtgcacgaataaaggattttaatacgattgacgatagggttgaatttttagaagatttgcaggatgcatttcttgatcacatgtttgttatgaagatttcaacaccagatgaagcgagtgcatttgttatctttgaaacgttgaatgctcgtggccgtgacttgaatagttccgaccttttgaaaaaccatctattccgcaaagctagtggcgatcctgacatacagcaccattgggaagaaatgatgactccgttagatttcaattctgatcgggctacgaagttcattcgtgcatactggaatggaacacatgaattcgttactgagaagaagttgtatcgtgctttgaatcgaagtgtggagactaagagcgacgcaacgcgattggttcagaagctttcagatttgtcagatgaatttgcttctatgctagacccaaagacccaaatttcgtttcataatgaaacattgattaataacttgtatgtacttaatcagttgggagcaaagactttttatccgctgattttagttatggttgaaaaagaatttgacgaagcagaaattgcacaagttttgtataagattatttcgtttacaatcagaaactttactattgggggtctagtagcaaataagtttgaaaaatcgtttgcaacaattgcgagaaagctaagcgatggcaaaatcagtactgttaaggatattaatgatttaatttcagaagaaatggttgataatcaacaatttgagaatgccctgaaatcagcttcgcttcctactgaaaaaacaactaaatatatattgtctgagctgtcatatcctgatgatgaaagtaaaatcctcttgactgatgtaaaagtcacctatattaatgaaaatgtggagaacaaggatcgtatcggtaataaattattgataacaaagaaagaggctaagtcgtttaaagatgcttcttctagaaagcaggaagttatagctaattcaaagtttgaagatactcgaaagtgggcgggtaaagtaaatgtaatgacgtcagaagagattgacaaacgacaggcttcttgggttcgatctgctttgcttatttgggctaagtaaaaacgatacaataaatagccgatttatgacaaataggctgggacagaattattttttgatcaaaaaataatttgtgattcaaagccagttaagctgaaataatgcatatacaaaaaagccgaaggaatcgtattttaacattcgtattccttcggcttttttgtcggtgtctgatttcgtgatgctcgcttgtatcaaggttttcagccgtttttttagaaaaatcatgctttatatatacatcttttgcattaacttctccatccgcaagataaagtctgcgtttaattacagttgtatccaattagtctaaccaaaatcaatttgatctaacatggtttcccgactcgcttggtctaagccaaggtaagttaacgtcatagcttcactagaatgattcagtaagtgcatgactaagccaatgttgtaatttgactgtgtatagacacgataagcgccggttttacgcatggtatgtgtgcctagatagtttatccctaatagatcaccaacgcgtgccatgaccttataaaactgcttctcagtgatgtgacggtctgggtgggcagttgaggggaataaccaatccgaattgatgttttcttggaccagccaatcatgatatttcagcaagtcttgttgcacgggctttaaatatagtgtatttgctttaccggtctttttatcatgaataaaggccgtgtgtttaacagagccatctggattatagacatcggatttctttaacgtcatcacatcactcacccgcagcagggtggctttgccaacttgaaagatggtgtagttacgtcgacctgcccgaaaactatcgagtaaggtgtcttgcaccatttttaagacgttagagtctttgattgggaggactatttgttgcaccatagtgaatttaccacctttcaaaggtcactttattgtttgttaaattagctaatatttgtatctttttatacaatgcatctttcgaaaaattaacatagacatgatatttactggaatctatagctttagttaattttgtaccttgtcctgagacgcgctctagggttcctattatttgtacagtattgggttcagtcgaatttattaaatccgttaatttagctatatctgacgacagaacaagtgtagatactaatttaataaagacgtctcggtaagagcttcctgtataatgctgtctaccaaataaaatcgaaatagtatcgttgtttggagtagggtccaccctatcaaattcggtatcatcactagcaaataagttaatatttgcgatatctatcaatacccgttcaactttcgataacaatgataaggcagaaaattggcttaatttatcaatatagctctgattaccttgggtattattatctagttcgatttctgctcgtttcattttttcaattattttgcgttctagcagatctaactgtgcttttgataaatggccatcttcacggccaaaaaatattaatttattccaccaaggcttattaatataatgttgctgcaaccgattaaaaatagcatttgatgcttgacctatatatcgtttatcagcacctaacaatatatagataccaggttttttagactcatcaatcaactgaatgctagttagatcatctttattcgcaatgaccacaaatgatggttcgtcatagaatattgaaatattatcattcccggactctcgattgataaatatgtgattgggcatgtgatcatcgacctcgttttttaagtactattatatcacctaacaaaaaaacaacccccattatctaaccggtagataatgggggctgttttaataggttttcacaggggcgatttatataattatagaccctatacaaacatattttgtaaaaagccttttttctgttctttcaacaaatctaacttacgttgatgaagagtgatagtgttgtctaactgtttgaaaaataacccaattttttgttgacgacttttgtctcgcactcttcattatttatcacgatgataaaaatcttttgtattaaagaagtcatttagaaccgtgttctcaccagtcattgtttcatgtaaacgaataccatcgacatttatccgcgcattacgataataatcatttgttaattgaccccatgatgtctgtgacgcatcaacattatcgaaaatactgaaaccgctactcttaagataagtatactttgcattatcatttgtataatttgtaaatgagccaatatctgctccaaatgggaaaatcaatactggtgttttaccaacaattggttgtacttccttttgccaaagtgcagtgtcctttttgatatcatcaacactggccgtagtcatatttatatgaccccaggaatgcgatgcaaactgccaaccttcctttttcatagcgttagcaacctttgtcgctttcttagcttcgcgatgtgtcttttttgtatcaccatattgactctttgatgaacgataacctagcgccccattataacccgtttcagcaatcacaccctttgagccaccgtatgagaaatctggatgctttttgatgaaggtatcaacaatcggtaccatgtcataatcaccaattttcttctgaccattattggtatattgatttttaacatcaccttgcttattgacgactaatttatctgcaaatccagaattcttcatatactcataatagttaacatcatcctgtgatataattaaaggcttcttgccttcaggtaatttgactggtttgaaagtcaccttcccttgtttatcaatcgaaatgatatctttaaagttaattaatacatagccattatcatataactgattcagcatcggcataaattcgtcgatggtcaccatataatctttgtatccctgtgcctgcttagatgagaaagctttaccaggatcaacaattagtgaatgataaaaaagatgtgaaatttttgtcggatcatcccacgtgaccaactttgactgttgcttattaatactcttttttagatgatcaactgttgttcctttgtgccccgataacactgattttgcttctttatattggtactgttgacttaatgattttgcctgctttactgtcttagttgtttgactatcagtttctgcagccataacatcatcatcaatattgccatataaccctaagcctgcccccaaaatcaacccaatgacgacaagactagttatcttggtttttatcacagctattcccccataatttttatgaatattaaacgacaagttagtgccattctatatcttattacctcaaaaataaaattattcgtattgttttataaatagtaaagatatcaaaaatgcgacataatcaaacaaaaaaagagtgattaaaatcactcccaaaaaaaatatttttaatgccacaatacctatttattgcgcatcatccttaaacttattatagtaatttgctcctgggaatacccagttagcacgaccgaatatcttgattgtcgctggaataataatcagacgaaccaagaaggcatcaaatagaaccccactggctaatgaaataccaattgacttaatcgttggatcttcaaccaaggcaaaacttccaaagacagcaatcataatcaaagcggctgtaataatgactggaccactctcttgcaatcctgttttaacagcccgatttgtatctccagtggcaatgtatgtctccctaatccgtgagaccatgaacacttcgtaatccatcgccagaccgaagacaattccaatcataatgactggcaaaaatgcaataattggtgatccttcactaatatggaaaacaccatcttgcataatcaatgtcgtcaatcctaatgatgcaatcaatgataaatgctcttatactaaaaaaatggactatttttattcagtccgtaaaatgaaagtataggagtatttttatgtcaattcgttattcacaagattttaaagattcactggatcatcagctttgacgattaattgttcttgagctgtttcttttaaagtttttgctgaattcgttatactgcaattgtaagcatatttaaaaaaatagttgaaatgggagggatttatatgttggaaagaaatttaacagttattggaagttacagtacgagagaagaagctttatccgtgatcgaacaactgcaaagagaaggctatagccgtgatgatatcattatttacaccaacaaagatgcagctacaaattttggttttgctggactgtcaggaatcgatgttaaaaccggcgtaaatggcgtcgaaacgactcacgaagatcgctcactatgggaaaaaatcaaagatgcattttctgctgatacgtacgaatacgattcaagtttaaatgaagaagctgaccatgcaaacaacgacccgctttaccaatatagagatgatatctcagctggaaaaattattatcaccgtcaataattataaaaacgacccaacacaagcaactgaaaatgttacaggcagacatgcagctggtgacactagcacaaataatttacatgcatcagatgctgcacgtgcaactgatctagatactgatactgatagtatccggcttaaagaagaacaattggatatcaataagcatgatgtgacgacgggtaaagtcgatatccataaaaatgttgtcaatgagacgaaaacagtcgacgtaccggttaaacgagaagaaatcgtgatcgaaagaaagcccggagatggtgcggctgcaactaccgatgtcaatgatacgctagaagacgacacgatcacgatcccaatcaaagaagaacagatcgatgtcaacaaacgcccggtcgttcgagaagaagttgacattcgtaaacaagaacacgaagatatgaaacaagtaagtgaaaacgtcggccgcgaagaactagatatcgatacgagtggtgatgcccacgtagaagacttacgcgataatgatcgcaacaagcatgaccggagctagtttctagctttgattttatcaaaccttttgaacaagaacttaaaaaagattactggcagccatcagaagatggctgtcagtaatcttttttggctctttgtgtgcgttcccgcaattaaaagccaaagaagccgaaaccaacgtcttcactttggcttcggcttcttttactgaatcaactaaaagaccacgtggtttccacgtctggttttactgctcttatactaaaaaaatggactatttgatagttatagaccctatatattcatagcccctttctgtttggtgttaaagtattagtcatcgatgtcatgcactatcttgtttagctccgttttgatgaaactgggaatattttctaaattgaaatgattatatatttctttatccttaagcatccttttttgtgccttatttaatttacactcattgttacccactacccattcatcctttgtacgtataaaggggttttgcgcactttcctttaacgcgttttgaacatcttcataaggtaaataaaattcaattgtagatttatttaattttacaatctaccatataacgtctccatcttttcaaaacgacttaattctacgggctataaataacttaatttgccagtgtataacgtttcagattaagctaccactatgttataataaccatatcgaaaggagatcaatctaatgaaatatacgaaaaccaaagcagtattaaatcaactcgttgccgatttgagccagatgtcaatgattatccatcagacgcattggtacatgcgtggacccaactttttgaagttgcaccccttgatggatgagttcatggaagaaattgacagccaactcgatgtcatttctgaacggctgattgcgcttgatggcagtccttactcgaccttaaaagaaatggccgaaaacactaagattcaagactggcctggtgaatgggacaaaacaaccccagaacgcctcgcacacttagttgatggctatcgttacttggaagacctttaccaacacggcattgaagtatccgatgttgaaaaagacttcagtacccaagatattttcattggtctcaaaaccgcaattgagaagaaaatctggatgattcaggcagagcttgggtcggcgccggaaattgatgaataaaataatattaaaaaatcggtaggcttatggtagattgtaaaattaatccgaacgcccatttggatattggacagccctagttcacaaaaggtttcgattttaattcgttcggaataggttatactagacaaaagatcagctcctaaaagatgggtttgtggtaaacaccattttaaaggaagctgatcttttttgtccgaacagcgttcggattaattttacaatctacccaccagaataatctgtgggacagtcccagccctcaccctttagcttggcagctacagcttgttcaaatttatctcccgctatttaactagtcttcttttcttttttagttgtaactatttaccaaaacgccaccactttttaggtttaggttgtgactccggggtgctattttcaggttccggttgtttgtctgacgtcacttctttttcaccatcatcatgcggtgccatcgttaaggctttcaagtccttaatttctgccttgtattcttcgagcagttgtttgtcctgtaaggccaatctctgttgctgatctagtaacttatgtaactctttcttttcagattgaatttctgatactaaatttcgaaggaatttcacttcatcttgtccatcaaccgcatcttttttgttgtcgtcaacatcatctttttgttgacggtatcttgttgacgaatcgtttgagagcattgctttaatagctttttgcccatcaacatcaacgtaaacagtattgccttttgttgatgtaaattgacgtaaatcgattgacgcatctctttttatcttttgccatatagcctgctttgaaacgcccaattcatcagcaagttctctaatagttttaggcatgatttccaaacccctttcggagttcagcaagtgcttcttttcttgcttgatctcttatttttttatcgtgttccgcttgtttctcagccaccgcttgtttctcagttgagcctaaagttaaccccttaactttatcaatggcgcgccatttttgatgttctgttagttcactattatgctgaatattgaaaagcttttgtctttcatcttgaaattgcccttgtgagaagtcgtctgcgttctttttttctgatttccaggtaaatgagtaaccaataaccggcttgccacggcctttaccatatttttttctaatagttagacccctgaaaagaggagttagttcttctttaattggctgaataactctggattcaacgtttgcaggtttattccaatagctttgcggaatatcaagtaattcaaaaaaatcacttttagaaaaataagcataaccagtagttcgaaattgtttaaggagacgaaacatcgtttttgcataactactctttaaatctctgaactctgctaaagcatatcgaacccagctttcaagattatttagaagtttcaatgccttggggtaaatttgaatatcaacataagggacttctgccgaacccttgatttcaaatcgagtaaacatgacaaacatttctctatcaagtccatctttacttctagagccaaatctaagacctaatattttttgatatgtactttgtatgtcatcaataaatcgattatttgcggtcggcttatacgcgcttaattcttttaactgatcaaaagtaaaccgaacagtatcatcacctttatcgcgcattctagaaacaaccgaaaagaaaagattcatttctacaggagtaaatcttctcagaggaattgtattcagttctggatcatatttaactaattcattgctcataaaataacctccttgaataatactactttatttgaatacagaagtaaataagcgtagtcgataaacagacaaaatgtagtcgataaagtcctgtaacccttaggagagtaggactaaataggggtctaaaagaggtttaaaagaggtactactgtaccagagccaaacctcaaataaaaaacacaaaggagcgactcaaaaatcggctcacattaaattcaagtcactatgctcccacgctttgctcgtccgctaccattgacagcaaacagttagtttttctgaatcttaacaagagtttagcggctatgttcgtttttaagggtcttatttttcgtttttagcggttttgagactgtttatatatatttataccaaagcaaaaacaaaaagccctcaacaggcttttagaggactaaataacaaaggcaggacgattaataatatcttcttgtcttttttgtaaaatataagtatatagggaatcatacaaattctttttgatctcgtcaggttcattgacagaatcttcaaacaattcttgaatatcaacttgccaaggatcagcaagcatttcatcaattggctttaatactttcttttcgtccatctgagttactcctaacattagctaattacttcaggtttaaattaaaggcatctttttatagttagttattcaaagattgtgattaagtttagaaagaaaaacggtgtaaagcaattaaaaagatttgtttgagcgcagcgaaatctaatacaatttttggggtatcgaaacacgtcaaagttagttgacgtgtaagtgcgcattgaactaaaaaaaaccttttattttaatgatcaagttagctattttttagcgtcattaaacggaatgaaatgagtttaatgcgcacttacacatagaacatctatgtgggtccgcaaaccgagcaaggctcggtcaaggcgcaaaccgagcaaggctcggtcaaggctcggtcaaggcgcacttacactccactaaaaattagtggaggttttgtgcttaaaatctgtctcagaagttgccttcggcaacaactaaaaatccaaataaaactaaccaaaatcaatttgatctaacatagtttcggtactggcttggtctaagcctaaataagctaaagtcatggcttcacttgaatgatttaataagtgcatgactaagccaatattgtaattggattgcgtataaacgcgataagccccagttttgcgcatagtgtgggtaccaaggtaattaatgcttaaaagatcgccgactttgctcatgattttatagaactgtttctccgtaatatgccgttctgggtgttgaatggacggaaagagccattcagattctagtttatgatcaagcagccattgacgatacaataaaagctctgtttgaactggtttaaggtacaaggtattaggcttgcctgtttttcggtcgtgaatgaatgcattttgtttaatggagccttccggattaaagacatctgcttgttttaggcacataacgtcactgactcttagtagcgtcgctttcccaacctgaaaaattgtgtagttacgctgaccagctttgaaattattgagtaaggtatcttgcacctctttgagaacgtttgaacctttgatgggtaagacaacttgttgcatagttttagctccttaaaaaattgatttttagtacaaatttaggaacgatagataacaccccaattgggcgtatgattgtcagaactttgctatcggttgcggagatggagcgtgatatgattatcgagcgtacgcaagccggtaaaatatttgcaaggcaacacaatcccaactataaggagggtagacccaaaagaaaaaaagatagccggaatatggctatctttgaatattctaactctcatactgtgaaggaagccgctgaagctattaaattattgaaaggaatcagccttttaaaaagtcaacaaagaaattctgctttaaatcatattagggtatcacaaatactttacaaatatgttttgcgtcgcagcaaaaaccagcaaattagacttagtatagcagagataatcaatacggcaaaaacaccataagaagacttttcaaacgggacatggacattgattccccaaaagccaaaaataatcgctggaatagtcaaaacgattgatatctctgttagagttttcataatcatgtttagctgatacgaaatcatattgtttatcatatcttccaaatcatccaaatattggctgtaacctaaaataattctatccattgtgtcgcttgtatcgtatatctcatcaattatttttttggtggtaaaatcaatatcattaatagttgtgaaatttttgttaatgaaatccagcgctttgtgattagcgccataggttgttgacaaagctatcatgtatttttgaagagtcaataaatcaccaaacgttggtctgagtggaccggacgttgatatttctgattctaaatcatcaatttttcccttgactccacgaaggtcgttaagcatcacatggaaatctttttgcatgatctttaaaagtacttcctgcatgaaattattgacatcacgtaaaaccatattggataagagttcgggaatgaattttaatttttgttttgtaaaaattatcaacttatttttaaataccaagaaaacaacagatgtcgtcagattatctagatgcccaccttcatgtacctcgggaaacaaaaaacttacgagcaaacttttttcatcgttctgatctatcatcgtgtcatatgcaactcgatcatcaaacgttagtatattgcctattttaaagtcatatttatgttcaaaagattcgatatattctcgttcgtcaccataaacatagacaacagaagagtttttgatatttgattctgacgaaactaataatgtatcttttgttaaagaataagttttcagcattgtaatcctcctgctttatatttttctcaaaaataaatgcgtaattgttgtgaaataaatacgttatcagttttaaaaacattttgtcttatgtatgataacctgccaaaaattttatctcacacattatctagacaatcttgtctccagcttctaatgtattatctaatttataattatagcccctaaattaaggaatgttttagtgaccacctaggatcatagttaactcatagcaaaactcctggtattttacttagaagtcaataaattaattggactgttttactgcggcactatatggcgtttttttattaatgaacgtagttattcaaacttgtaactaattttttaatttcgtcacgaaccttacggaattcttgtagttgttcttctaaagttcctgtggcttgcgctgggtcagataaaggccagtgtaaactcttggtttgagggggaagcataggacatttatccttggcatcaccacataaagtaataactaaatctgaagtgttcaaataatttagatcaattaatttagagtagtggctactaatatctactccatcttcagccataactttaacagcatttagatttaacccatgagtttcaatccctgcactctcgatttgaaactcatttgccggcaatattttttttgcatatccttcagccatttgactgcgacaagaatttcctgtacataaaaaataaatttttttcattctaaactacctataattttaatttgtataacaccatgatacaccataaacttaaatgcaatgctttcatcaacataggtgtataagtatcaaggtcttctatgtactttgtggcgctttaaagtgccattatctgaaaaataggtattaccaaaatctttcaaaatggcccctgttttctccataatttttgaatcaatcattttctcgtcctcgtttgctaaatggccaccattttttagatttattttggtcctgagtggcgctctcttctaaatcattatgatcattaacttcttcttttacaaaaggttttgattgtgtagtcaatgatttcaggtctttgatttcagatttgtattcttctaacaattttttatcttgcagcgctagtctctgttgttggtctaacaagttttgcatttgagatatttgcaaatctctattttctaattgtcggtctttgactgctagttgttcgtctctatttttttaacttcttcgatttcatttaataaatattggttgatatcccatgatttttgtttgtctgtttgtctcttatttgtctgtttttttgatagttttttgtttgtttgtttgtctaccttagaccttataaatcgctgttcttcgatagacaaaacaacaattcctctatcatttttttgtctacttttatttgtcagtgatttaatatgatattgaatggcttgtttagacacatctaactcttcagcaagttctcggattgtttttaaattttcactcatgatctatatcctgccttttaacgattggtagatactgttcaatcgattttttaagatacttagcaatattctttttagaatagtcatcttgtttatctcgaatatatgctaagtgttctttcacgccctttaaaccacgtaactcttttaatttgtcataaagtggataaacatttttctgtaaccctgacaaaatagccgtatccgtcaaatcaatatatgacaacaagaaatgttccatcagcaattttgtatatggacttttcatagcttcatatacgaggtctttttcactttcttcttgccttatcttaccgtcaatataagttggatcatctaacttgtaactaatatcatctgccacctgctttttagtgatatgaaagacgatattatcaatgctgcgtccttttttaactttttcatatataacattaaagctggtatgatttgtgatttctgctagaggttctttcaatactctcgtttcaaagtgagtgaatcgtttgtattctgttatcgtatcagtcatttctcgtaactctttcataccaatttcaggattacggtacctgtcaatttgttcttctcggcgtccacctttaacactatagtgctcgtattggttgtaattcatcgataaccaacgatacaaaataacggcatatttactattcaattcggaaatttctgacaaggcatgttgtgtaaaattggttttgagattaattaaatagggcataatttcaggactaaatcgaattaatacctcatcatgataatctgtccattctacatatggaattggcacaatgctaacaaacttaaaacctttatcttgttcttttttaatctgaaaaaaagcctgtttttgcattttttcaattgcctctttaaaacgactatgcttatcgttgtcatccactttaaagaaagcaaacatttctttctttgataaataaaccgtctgatcctgaggtggattgtcggtatcaattaaaaacaccgctagttcaaacattttgagtggtgtcttatccatcttggcaatggatgtgattaaactattatgttcaacgacttttctttttgataattcattcaaggtctgtacctgccttgtctttgattctggtataatagtcatataaatacactcctttgggtgtgttgttggataagcataaagaaaaacttttagacgggaatttctttatgcttttattataacattatatagccacttattttatttttttgtggctatatacacagttttttgtggttatatacacagttttttgtggctatataatacgtgaatgcattgttattactgtatttataactacgcaaaaggctcctatgatggaattacggacaaactgttcgatataatacatcataaaggagctttttattatggcaattaaatattcaaatgaatttaaagaatcgattgttagcttaagtcagactggccgttcggccaactcactggctaaagaatacaacgtcagtgtttcaacggtcactaagtggattaaacaagctgatcctaacaacactaaagtgctatcatcaaatgaacgtgctctgattaaagaaaataaacggttaaaagaagaacttgatattttaaaacgagcggcggtgctcatggcaaaaagctaattattaaagggcgtgccctcgtgttagaagtcgtcaacgctaatttacttgctgggcaccgcattacgcgtatcttatcagtactcaaaattccgcgctcaacctactatgattatctacattggcagccaagtagaactgaacgccgccggcatttaattaaacaagaagtgttaacggcttggttaagatatccaatgtatggctacccacgattaacgatcttactaaatcaacagtctgatattcacgttagtcagcgtctggtctatcaacaaatgtgtgaattagggattagatctagaatggttaaacgaatcaataagccaaccactcagactgattatgatcagcgaccaaacttgattaagcagttaactgatcaatctggtattttattgactgatattacgtacattccccttaaccatacttggtgttacctagctagtgtctataatccagtaacccgacgggttattgcttaccaacttaatacgcagatgactaaagaactagcgactaacgttattacccaagtcatggcgcaagcagttaaaccacaaattattcatagtgatatgggaagccaatacacaagtgacttatttgaaaacactttatcgaagtatggtatcaagcattcttactcccgaaagggtcagcccggcgataatgcgcgaattgaaagttttcattcaattttgaaacgtgaatacgttaatttccaagattttaagacaattcatgaagcaatcgccggaattgataactatattcgttggtataacagtgatcgtatttcacttgtagcgtagctacaggctattaaattcaataatgttggggcttatttaatatactctaaagcgtttttaaaatctgaacgggactaaaacttcggcctccgaaaattaaattaagtaatttaaattgaaagtcaaatttgttcgtacttttatgtccggattcttgacataggagccgtgcttccacggatgacatatcaataatcttttttctactagatcgcattttaaattccccaattatatttttaatattattttatttagtatggtagattgcaaatttaatccgaatttttggacaaatttgtcagcataacctgatacggtgtttgccagtcgagtattttaagcggtcgctggttaatttggagtaacgtcgtcgttaaatcttgagcactaatgtgctcaaaacgagtccctttaggataaaaataacgtaaattccgattaaagcgttcattactaccacgttcagctggagtataagcatggcagtaataggtcttaataccatattgtgattcaagtgatactagcccactaaactcagtgccacggtccacagtaaagctgtgcaccggaccattaaaagtggttaggaacttagttagtgcttcattaacagtcgctgtcgtccgatcttttaaccggtatgcccaaaggaaccgtgatttgcgatcgattaaagttaataaaactgccttactatgcccacgaggaccaacgactgtatctagttcaaaatcgccgatgcgcttacgtttattaatcatcatgggacgctgttcaattgatcgccccaaagattgattatatttggatcgttggtcaacgttacgccgttggcgtacgccatgttcaggtagatcattcaaggagaaaccaattctcccctgatttagccaattataaatagatttagtagctagtttaaattcgtgagcaatcattcctggtgaccagcttagacgtaaatggttgagaattttttgctttaactcatcgctcagcttagttttccgaccacatcgtgatcgcttgtattcggcatctgtttgtgctaattcagcctgataaggttgacatcgagataattcataagaaattgttgacggtgatcggttcagccgaacgcccatttggatattggacagccctagttcacaaaaggtttcgattttaattcgttcggaataggttatactagacaaaagatcagctcctaaaagatgggtttgtggtaaacaccattttaaaggaagctgatcttttttgtccgaacagcgttcggattaattttacaatctaccgtatgaaatgtttttcacttaaaaaatgacctcactctatgttaaagcctacaatttcctaatctatattttttattttaccaaaactacattgtgtagtatcttttaaatagttcataattacaatgaattttatagttacttactctttaacatatctctcaatcctcataaccaagaatgttgatttttaagcagtcctttagaatccggacatacttttagatcattcatattcgtttaattaactattgaaccactagaaggcacctctctactcattttacacttttcatccccaaaaaagatccatataagtaataacataatcctcaaaaaccacaaaaataacggccccatttagggaccgttatttttttacttttaaatcagcggattttcatccaccgccggcaagtatctgccagccaatccggcaattaccgttagcaagccaacgctaatcaggccggccaagtgaatcaactgactggttgtgtcagacattgcgacgctgccactgatttgggcaatcacggccgttatgtcttgttgccgcattacggctaggcccatcaagccggtgatcaagataaattgcattaggatactaccgagatacgtattccgatatttaataattaaggtttgggccggcgtcgtgacgccggtgtaataagcgcggtgatttaaaagaatgctgttggcactgccaaagaaactaatcaataagatgcctaataaaattagatgtggcgtaatcatcaaccacgcaccaacaacaaatcctagtaattggacttttaagtctgataacttcgaaaagcgcccttgcacgctctttcgaataacttgggctaaaatcatccccgcaccgtaagtcacgtaggtgcctatcatcaaactctgattttgaattgcgacaaaaatatagagcattaagaacgtttcaaacgccccgttaattaaagccgcaaccaaaagccaacccggcatcttcgttttagtgccgcgcgtgatgatcacccgcaagattagcgcgactaacccaatgacagcgactgtgattaataaccagacaaatttagcttcaaaaaggcgcagatatcttagcgcaaacgccatcgcggttgcccagacaaatagttccaagttattaagcgatttggtttgttcgacgaacaccgattcatcaagttgcttcacaaacggttcgaagcgttgcatgccaatgaaaccaatcaatacaaatagcatgataacaataaagactaaccgatatgaaaaatgactagcgatggtcaacagaccaaccgttattaggctaaaagccaataacgttttaatttcagtgcccataaggtgccatttccaaaccactcgctcgtgataataaacgccctcataggtcggcatgattacactggcgctggcccccaagataaaagccgccatatcggttagatacaaccacggcgaaatggccaataacaataaggcaccagcagctagcagcatactgatactagttattttaaatgaattctgcacgtggcctagactactcacgaataataagccagttttcaacgcggtatagaataagatatacggcatataagacgccactgactgcccgctatgaatcatggttaagccaattaaagggagaatttgaattaacttcgccaccgcaaagacaatcccttgtttaattttttcactagtcgctaattgttgcccatttgtcatcaatcatccctactttcattgattagacggtaccttatattgcgtctgatttcaaagaagtaccgttaaaagcctaaattgattgcacaaaaaaaacaccgtaagtcgtcgaaacgacttgcggtgttttgattaggattttattcccactccactgttgaaggtggcttgctcgtaatatcgtacacgatgcggttgacgtgatcgacttcgttaacgattcgcacagaaaccttttgcaagatatcccatggaatccgtgagaagtcagctgtcatgccgtcgattgagttaacggcacgaatcccaactgtgtaatcatatgtccggccatcacccatgacacccacactacggatgcctggtaaaactgtaaagtattgccatacagttttatccaagccagcgagtgcaaattcttcacggagaattaaatcactatcacggacaatctttaatttgtcttcagtgacttcaccgaggacccgaatcccaaggccagggcctgggaatggttggcgccatacgagttcatatggcatgcctagtttttcaccaaggtcacggacttcatctttaaataatgtatttaaaggttcaattaagctaaattgcatgtcttctggtaaaccaccaacgttatgatgtgatttgatggttgtcgcagtacttgtaccactttcgataatgtcagtgtataaagtcccttgcgctaagaaatcaattccgtttaacttagttgcttcttcgtcgaacacttggataaattcgttaccaataatcttccgtttcttttctggatcagaaacgccagcgagtttactcatgaaacggtctttagcgtccacttggatgatgttcaacccaaatttaccgccaagactttccatcacttgttcaacttcgccttttctgagtaagccgtgatcaacaaagatgctgaccaattggtcgccaattgcgcggtgtaataacaccccaacaacagatgaatcaacgccacctgaaagaccaagaaggactttcttgtcaccgacttgttcgcgaatcttttcgatttgcatgtcgatgaaatcgttcattgtccagttgtcttgggccccacagacgccaaatgcaaagttcttcaaaatatcgttcccgaattcagtattccgcacttcggtatggaattgaatcccataaatccgacgttcacggttttcgatggcggtgaaaggtgtattatcactttcagcaaccgttacgaaaccttctggaatcgctgtgactttgtcgccatgactcatccacaccgtttgtttttcaggaagacctttgaataagtcactgtctttgtcagtgactgtaatttcagccttaccatattcacgttctgttgatgcttcaacattcccgccgtttttaaaactgatcaactgcatcccgtaacaaatcccgagaattggaatccctagttcaaaaatttcggggtcaactgaaaaggcaccatcatcgtaaacactcattgggccgccagagaaaataattcccttaggggcgatcttcttgatttctgctgctgttgtcgtgttaggcaacaattcagagaaaatcccgaattcacggatacgacgtgtaatcaattgattatactgactaccgtaatctaatacgataatcttatcgaaatcttgcatgtccttttggaccaaacaactcactcctctttttaaaaagcaatttggtgtgaacaagtaacaccaaattgctagattcataacactaagtcaaactataatgtatctattttactgattaataatgaaaacgtcaatggattgacggccttcctgtgaaaaaactcattctattattaatatttacgtaggaataccttatcaatcacgtgatgtttcgttttatgcaaaatgacatcggcacgattacgcgttggtaagatatattcgtttaaattttgtaaattaatgtcacgccatacccgccgcgccatctggaatgcactctgtcggtcactgatggcgtatggataatagtagttggtcggatcatctttggctaaatcgagtaatagatcgaaacgttcaaggaaccacttcttgattaagtcggcttgcgcatcgacataaattgaaaagtcgaagaagtcactgacgtaaatctgctcagttgatggcaactgtagtacgttaattccttcaacaattaaaatatctggatcgtcaatcacgtcgaactcgtcgggcacaatgtcgtaaatctgatgtgaatatttcggtgctttgactggtccaacattatttttgaccgcattcataaattgaattagatgcggcatatcataactttcgggaaagccttttttatcaagaattcctttttgtttcagcgtggctgtcggatataagaacccatcagtcgtaatcatttgaaccttcttatccgggtaggcccggctgagaaggagttgcaacaagcgcgccgtcgtactcttgccgaccgcgacgctcccagcgatgccaatgacaaatggtgtcctatgtggcttaatctctagaaattcagatttttcggcctggcgcatctggtactgttcatagtgcatctgtatcagatgccgtaatggcaaataaatatcactcacatccgcaagtgaaatccgatcattcaatccccgaatctgttccagctccgtgtccgtgatgccagtatacgcgtcaccgcggccatgaaaaacccgccactcatcacgcgagatttcataatatttcatctcgttcttcatccgacaatcctccaatactaaacgcatccattttaacattaaaaacagagtgcgtcatcttgcgattatatttcgaggattagtctagtaccgtgaataagcgctatttagtagctcgccttttttctttataaatgattataatcagcatcccaaagctaagcaaactaaccaccgtccctattctctgaatcgtagttgttcgataataaacggtgattctaccagttcccttcaacgcaacttgtgttaacccagttcgtttattcatctgcattggtaatcgctgatgatggttgagttcggcaacgtaccctttgtaataaataaaggggacttcaacaactgctttttgatccgtcagtgccctgaaatcaaactgataacggccccatgtatgccgtacatttgtaatttttattttatgcggctgatacttaacgacctgttttttatgtcgcaaaattttctggtagtcggtttgagcaggtaaatactcatgtccggccccaatgtaataagggttgggcgtgttataggcagcattggttctaaagcgccaactttggttttgaatactattcgtagagtagatgacatttcctgcgcccaacaacagaattagcagataaaagtagtacttattctttaataaatggcattcatccttagcaactaagtaactcacaattgccgtaataatggcaaaaaaacgccacgggaactgaatcgtattgataattgtatgatccaacaaatgccacggcataatcgacgtcgtagctatgaatagtcccaacgcaatcccaattaaatcacggtcgtttttggaatagtaaaatagaccacacgcgatgcctaatccgagtagaatcgtgataccgacattcactgtattcgcatgaaaaacagcattcgttaatgaattaacaacaatgtctttaaagggtaatgtgcggtcagacaaaaatgccaggggttgtgcggttacttgaaaaatcgtggttgccatttgttctccaaccgctaagaaataacgccctaataaaccgattgctaataagccagcagcaatgagatactttaaacttttattttggtagaatctcttgagatttaataaggtataaataatgatgacaatgcccatcatttcaacagaaatcatatgactataaccaatagctgccatccctattgataacagataccaataccggtgctcacctttttttaaccgcgttagcatcacaatcattaatgggaaaaaggtgagcgcgatcacctcaccaatggcttgccgattaactaaatctgcaaaacgataaatactaagaccgtacatcaaagagaatattaatgcttgcttcttattaaaatccgctaattttcctgaaatatatgtgattaaaaacgtactaaaattaatcgcaattgcaaatacaataaaactctctttgattgatagtcctactactctcagaatagctggtaagtagagaaaagcatctgggtaaaaaagacctgccgcatagcccattccgccgatgaaaaagtaactgattctcggaaaccactctccctgtttaatcgaaagtgccaaattctcaatgcggttcatgtggaaatgatagtcagaaccagacaggattttattgggctgtaaatagacgattgcaaccatcgcaatacttaatagtccaaaaaataatagggttactgttaaggcatgtcgcctgtaaaaatactttaatctttgcatcatatactcctcataaaaatactttagtatcgataattgccattccagcatcagtctaagggggacgatcgaattataagtaagtataatataaataatgtaataatggacattatttatatataaactttaacgaatagaatcggtcaatgtacaatattttgtttggcaattaataagtaatccataagctaagaaagcgataagatgcaaaaaagcgggctaaataattattagcccgctttaaaatccattaaatttataaataaacattttaataattaaaagcgctttattaaaatattcattgtctattttctcgcgattacacttttcatccaatcaaaaaacgcccgcctttcagcgcgcgttttttctatttaattaacgtgtaatcatccgcatccacattatcaatcaatggtgacatgccacctgttgctaataaagtgaggcgatgcatcgctcttgaacagatcgtgtagagcaattgccgttgatcttcatgattgtagttggttgcgctgacttgccagccgataatcgcatcgaattccaaccctttggctaagaaacttggaacgactaacgtgcccgctgccaaacgttgattttcggaacgaattaaagttacttttgtaccactggctttcaacttagcggttaattcttgggcttgcaccaatgtcttggtgataatcgccgtcgttaacttatctgcttcatttttagcgagttgcgcattcacatcagcgaccaattgatcttcgctttgacgcacgatcaagtttggcttgtcgccttcacggttgaaggcttcaattttttgaccgccctttaagaggcccttggtaaagtcggtgacttgttcagttgaccggtatgaacgcgtcaattgaacgaccttcgtattttgcgcatcaaagagttgttgcacttgttgtaataggttcgtgctgttttctttggtgaaaatcgcttggttcaaatcaccgagtaacgtgaagcgcgccttagggaagtgcatcttcaagaaggccagttcgtatggtgtgtaatcttggatttcatcgataaagacaaagcgcatgtcgcgttcgccgtgcttaccggtcattaaatcataaagatgcaagtaaggtgtcacatctgataacgtcatttgtttggcctttaaattagcgacaaaatcagtcacatgatcattccagatttctggtgtcaggtcaaattcagccaaatcaaccaattgcggcacaacccgcatgaagtggacgtattgtgcttgaatactcaagaagcgattgcgttgaattcctttttgaacgggtttgaaagccttcaaaacgatttgtttagcgatatatttactttccgcttcaccagtcttaaagtccttacccgccataatttcgcggagttcctcatcactcaagttttcagcgcgttctgtcacccagtccgccttggtttcgtggtcgactttatggctcaaactgcgcaataaactttccttcgtcgcatctagccggtttcctaaatgatagttttcgttgaaacggtaatagacgtcgctgattttttccttactaatcaagaccttcccgttcactttcaaatcacggaagcgcatatcgcccttttcaagatgcgctgcgtaacgtttaactgctttatagaagactaggctttctttcaaacggctaatccgcgcatcagtttccgtgattggggtttcaaattggtcaaataaactctgaacagcaaggttcggcaaacgccgtgcaacatattgatagtaagtcatttgaatcatgttttgttcgccaagttcaggcaacacgtcagcgatataatcgttgaacaattggttcggcgagaacatgatcacttgactggaatccaggttaccccgataccggtaaagtaggaaggcaatccgttgtaaaatcgcggatgttttcccagaaccagcggccccttgcacgaacaataagtccgcgtcagtgttccggatgatttgattttgttcccgttgaatggtcgtcacgatactcttcatttgtgtatcagacttttcgcccaatacttccagtaacatttggtcaccaattgtttcttgcgtatcaaataacgccttaatttggccatcttcaattaagaattgacgtttcaaagaaatattgacgtcttgcgggccgtcaggcgtttggtacgtaacttcaccagtcttcccttcatagtaaattgatgaaataggtgcccgccagtcataaatcaagaaatgatcttcgcgatcggtgaatgaccctagcccaatataaatggactcagactttggttcacccttttctttaaaatcaatccgcgcgaaataaggggttttttccattttttgtaaagtctcaagttgccgggaagattgttgccaagaattattccgttcttgcaacatttgccgttgttgttcgattgagactgccgtttcagtcattgctgaatcattattgaaattcaaccgtacatcattaaagaagtttgcgttaatttctttttcttctgatttagcccgttcaacggcgccttcgaagtgcttttcggcgtttttaattaaaccgacaatctcggttaaacggcgttgttctaatgatttttgttcgtcagtcaaagcagatgtcccccgatttctaaataaacagttctacaagtttaacactaaattcacaagagtgcgacgataggcgcttatattttgagcattaactggatttaccgaattggcgatgcaatcgtcggttcggtaaatttggttaagcgtagaaatatgcctatcggagcacgtttagagtgcgtttgaaacggtttaactttcgaggattagcctaatcagggaaataagcgatgtagtcgattgttttcctgatgtagctaagcggaaaaagttatttgctaaagcacgtttcacgatcttcccacaaaaaagccggccgctgcaaccactagccctaacccgtaggttaatagcagataaccaaagaaaatatggtaacggcggcggaaccacagctgactcaattcgctattgaacgttgagaaagtcgtgtagccacccaagaccccgacgcccaaaaagagcgtccacgtttgatccaattgtgccccggtcacccagcctaagcaaaagctccccgttaaattaattaaaaaggtgattaatggatattcgctggcaatctgcgttccaagacgggttaattgataccgcaaaatagcgccgattgccgcgcccaatccgacaattaataacgtcatcattttagcacctgcgactttccttgccgatcgagcagccaaactgcccagtaatctgccactaaacttaagcagacaccgccaatcaaactaatcccgatatacaggctaaatggccaccattgattggccaccaataacttcaatgcatccacgctaaaactagaaaaagtcgtgaaggcgccgaaaaagcccgtgcccattgcaagtgccagcgtatcgctgatctgataacgaaccacgatgtaacgcattaaaaaaggaagacaaaacgccccgattaaattcacacacaaagtgccatacggaaaccctgctgcttggtgcaatccgagcccaattgcatagcgtaaaatcccgccaaaaaaggcaaaaattccaaccgcgagactttcttttatcttcattttagatcgccccctttttaatatcgtagcatctattttacagaagttattaccaattgtaaattagttgtagatattaactagcgataatgccaactttttaataataatttaatcactaacgaattatcaacaaaatcgataatattagcgccaatatataaaaagccaattttacgaacccgtgctgttgctcggaagctatttggctttgacatgctttagtacccatctagctatcaaagccaacttcctgtgcacagctgtggcccgcaaacagtcggctacaccgcctatttacgaacccgtactgttgctcggaagctattcggctttgacatgctttagtaggttagtgtatgctctacacaactttattgtgcattgaaaggatcttttttatgacaagcttagcgctcgtaatcgttctattggcggctttaatgacgccgttactcatggcaaaatttaagatttcttatttaccaaccgccgttgcggaaattttggtcgggattttactcggacaaagtggcttccacctcatctcaaccacccccacactgacggaactttcatcattgggtgtgaccgtcttaattttcttaagcgggatggaaatcgactttgaactctttaaaaagcaacccaccacagctaaatctggcgttaaaacaccgctgacgcccttacaactggcagtcggtagttttacgctgatcctattaagttcgctaggactcgccagtttattggcatggagtgggttgttcaccgatattggactcgcaacaattctcttttcaaccatcgcgttaggggtcgtcatcgccgcgttgaaagaaaaagaactcctcagccagccgcttggccaaacaattctgttaattgccgtcctcggggaaatcgtcccgctgatttcgttaacaatttatgccgccctcaataatcctggttctaagagtctgtggttactatcactaattttcttagccgcgatcttcttattgatgcgttttaaaactgtttatcacttctttgagcggattgataagtcaacgactcaactcgatattcgtttagcctttttcttaatcatcacacttgtatcgattgccgaagaagtcggtgccgaaagtattttgggcgctttcttagccggcatggtcatgaaacttttacgcccccgtgaagagacgcaagataaattaacatcaatcggctacggctttttcattcccatcttcttcattatgaccggtgcaaaactcaacatccccgcgctcttacgtgatcctaaatcactgaccctgattccctttttcttcatcagtttcatgggcgccaaagttttgatttacttcgtcttaaaacggcgcttcaaagtcaccaacgccctcgccgggactttcctcagttcgacgaccatcacgttggtcttacccattttgacggtcggtctcaacttgaaggttatcacgacacagcaatccggcgctttcacaattgcagcggtgattagctgtattcttggtccgattctgttcaatcgattctacttaccaacgcctgaagagatgccacgcaaacgtgttaacttcatcggcgccaacatcatgacaattccaatcgcccaacagttatccaaaggtctgtacacaagcgaattatttaccaataacgaacaaaattatcaaatctaccatagccaagccaacctcgaactcttgcctgacttggcaccagccaccttaactgacgcggccgtcttcgatacagatatcctggtcttaggctatttaaataatgagcaaaattatcaacttgcccaacaagcgattcaggccaaagtaccgcggatcatcgcccgctttgaatttaagaatatctcggacgatcaatacgatgaacttaaagaacatggcgttgaaatttttaacacttacgaagcaaatatcagtctgttgcgaagtttaatcgagactccatctaccttacaaatcattgataacactgatgccgggctcttcgaagtcacggttaaaaatcggcgcttcaccgggattcaactttctaatctcccatttgtggaccaagtcacaattagtcgaatttaccgcgataagcaactgatcatgccgcatggtgacacgcaaatccatctcaatgatcacctcattctaacggggaataaacaggctgttcctgccattcgacgccaattagaaacgctcaactaaatcatgttgaccctcgcacattctctctaataggtttataatgaaactatcataattaaaggatggtgcagatatgaaacaaggaacaacaatcctcacattggataatggttaccatttatggactaatacgcaaggaacaggcgacattcatttactctgcttacacggtggccctggtggtaatcacgaatactgggaaaacttcggtaaggaattagctgatcttggtgtacaagtacacatgtacgaccaacttggttcattttattctgatcaacctgattactcacaaccaggcaatgaccaattattaacatatgattacttcttagatgaagttgaagaagtccgtcaaaaactgggcatcgacaacttctacttaatcggccaatcatggggtggcgcattggtccaaatgtacgctgctaaatatggccaacacttaaaaggtgccatcatctcgagtatggtcgatgaaattgacgaatatgtcacaaacatcaacaaaattcgtgaagacatcatgacccctgaacaattgaaattcatgcaagactgtgaagctaagaatgattacgacaacgatgaataccaagcacttgttgacaagttaaacgctggttacgttgatcgcaaacaaccacttgcaatctcacatttaatcccaacaatggcaaccgacgtttatggcgtcttccaaggtgataatgaattcgttgtgactgggaaattaaaggattggcatttccgtgaccaactccacaagattactgtcccaacgttaatcacatttggtgaacacgaaaccatgccaatcgcaaccgctaagatcatggctgaaaagattccccatgctcgcttagtgacaacgccaaatggtggtcaccatcacatgattgataacgcacccgtttacttcgatcacttgaagactttcatcaaagacgtagaaaatggcaactttaacgattaaataaaaaaagccgcgcacaaatttaaatttgtgcgcggctttttttgacctaatcaataatatctgaattaggttcccatttatccattgtatcgaataagtggtttgtttgtgcgaataattgagaaaggtctgcattgccgtcatctttaaaatgtttaaagaataagtagaaatcgacttccaattgatcaaccattcgtaatccttgctcattcaatgaaatgaatactttacgttggtccatttcatcactgcgatttttaacaattaagtgttttctgaataaaacattaattttacgtgaaattgctgggcctgaaagatcaaaggattccgataatttcgccacttcaatattggggtttaatttgacctctctgagaatcaaaaattgatcgtatgtcaagtcgtgcgtgacagttaaatgatttatcttattgtaaatttggccaatttgcagataccattcgttgaatcgatcaacaaggttactatccgtttctggttgcatcgaaccactcctttacataaacactaaatgtggttattaagtgttactagtcaaaaataacacaaaatgtataaaattaaaagatttatgcttaaaatattaataaatattgataaagttatttattagtatcttttaaaatttattctctcttaatgataattgcaattgattataaatcaattgttattattaccattaaaaattataaatgtatataaccgttttgcaaaaaatatggaatgaccctgcacaccatttttatctatgctagaatgaaggtactaaaagctattgttggagggttacgatatgaaacgaatcacactttatttagtgcgtcacggtcaaacattctttaaccgttataaccggatgcaaggttggtcagactcaccacttactccgaaagggattgcagatgccgaacgcgctggcaaagaattagcgaaagttaattttgctcaagcttattctagtgaccgcagtcgcgcaatggacaccgctaaaattattctccataagaatttctaccttgatactccatatgctatcacaccgcacttccgcgaagaattctacggctattttgaaggtgaagattcacccaaagcgtggtacatggcaggtgccagtcatgatgccaaaaccttccaagaaatcatcaccaaatactcactcgatgcctctaaagatttcatgagagaagctgatcccttccacgatgctgaagatgccgctgaatattgggcccgcgtcggtaaaggtttcaaacaacttcgtgctgaatgttctgacggtgataaagtcttgatggtcagtcatggcacaaccattcgcagtattgttggcaagtttggtaacgaccaattcgatgttaccgttagtccaatgaacggtagtattactaaagttattttaacagacgaaggcgttactgttgaaagttacaatcaattaacccttcaatagtatcaaaacgataattgatgtatgaatattcattgaatatagagctgggcaatattattctgattgttcagcttttttcgcgggcaataattcatgtcgttcaataataacgcgcgcttcaaatgacagtttcggcagtcttctttggctttttttgtaggtaaaatgctcaccccaattgtagctaagcaagttaaaaactaatccagcgtggtatacgcctcttaataacatcagtgtaacaagtagcgtctagagaaacaacttcgacctcatctaaaaaaagccccctttaatctcgaagttcagattaaagggggcttttttagactgattcctatgttttaaactgtttcaaccatctactatttaacttccttcaacacaattcctttgtagagccatgtagtgagtaagtagtagattgcgtagagaataatgaaaattgaaaatggaatccagagatcattatatggatcaatcataatcaatttgaacaattgaagaccaaagaggacatggatgacgccgacgatgcctggtaagaggaataagaccccaatttctttggcaatggattgttgcaatagattgcgacgcgtcccgattttagccaacattgtgtagcgtttaacatcactagctgccccagataaaatcttgaacatcaagcaacttgctaacatcgctaagaatgcaatcccgaggaagaagcccataaattcgagcccactgaacatgctgttcgctagcttatagttagcatacttgctattatccattgtagccccttgacctttagccaattcaggatttgcaatcacttgttgtgcgtgaatttttttgataacgggtaaattaaccgcaaagtctttgacccgatatgttttaacttgcgtggttgcgcctgccacttgattaaattcagcgtcagagacgactttaacgtccttactagattgacttggcacttgaattgcgcgcaaggatgaagaatcgccgttttgaatctcactgagtttcaccggtttaaccccttttgcgcgggcgacaccattcccattaccaaactgaatggccatgattggtgacttttcaagttgtgctgtccgatagtagacagttttcgcatcttctttaacatcgtaattagcagtcgccttcacaccctttaaatcttttgtgaggcgcaatgcttcttggttcggttgatttaaaacaacgtcgtaaggcgccattgtttctgccatttctggaatttcactttgatagccaatcccaactgtaattgcgcctagtgccgatgcaaataacatcgccaccaatgcgagcatcttggtgtaatccttaatgcggaagctcaattgcgctaacgtaaaattatttaaaccacgattacgaatcttgctgttacgtttgagcaacgtaatcaaccagccgaaaagggcattaaacaagaagtacgtcccgagcacaattgtcactaatgccacaactaagcccataatttggaacgttgcgactttaatcatcatatagtaaccaacagctaagaaaagtaagcccaagacaatttgtacaatacggcttaatttattttgtgaaatgcgatttggttgttgatcatcgtgtaagagttgtaaaactggtgttttcaaaagttggaattgattaactaccgctgcaataatgaacaagataatgaagaaaatcaaagttactaacactgcaggtaagtaaaatggtgaaaaatgcttaatctgaatatccatttgagacaataacagattgctaacaatttgggttaatccgaccccgagcgccgttccactgagagtagcagctgtcccaatcactaatgtttcagcagcaattagttgggcaattttgcggccttttgcgccgagcatcatgaacatcccgtaatcacggcgccgcatgctcattaagaaattattcgcataaataatgtagactaatgtgataatccctaataaaacagacccgatttggaaaataatgcccgccatactaattggcgagttactcgtaacgaaacttttgttagttgccagtgcttcgaacatgtaaaaaatggcacttgccataattagaccggaaaaaagcactaaatagtctttcaaacggcctttaatgccggttaatgataacttcaataacatatttagacttcctcctaatggttaaatgtgcctaatgtatctaaaatttcttgataaaaggcttcccgactcttatcgccgtgaacgagttcttggccgatttgaccatctttaataaacaagattcgttgacaataactagctgaaaatggatcatgcgttaccaataagattgaaacgcgttgttcttcgttcagttgagccattgtatccaataattccttggcactctttgaatcaagcgcacccgttggttcgtctccgaataaaatagctggattatggactaaagcccgcgcagcggcgacccgttgtttttgaccacctgataattcagttgggtatttgtttaataaactatcgattgataacgtcttggcaattgatgtgactaaatcgcggacttttttaccgccaacattttgtaacgtcaatggtaatgccatattttcataggccgttaagttttctaataagttgaagtcttggaacatgaacccaatttccttggcacgaaaatcagctaattcattccctttcaacccattaattgcttgcccgttaatttcaacttggccagcagtcggtttgtcaagggttgataaaatgttcaataaggtggttttccctgaaccagaagcccccatgatcccgacaaattcgccctgtttcacatcaaaagtaacgccttttaaggctgtgtattgtttttcgtttggtttaccgtatgtttttttaacgtctttgacgctaacgactgttggtgtgtccattaataatgcctccagattttatgataattctatcttacaagagattaaaacggcatgcgcgctttttagatgacattttaacgggctaaaataacaattttgtaagattattcccccgttctttaaaaatcaatgtgaaacagtcaaaaaagttttgtcttccctttctgatttgattataataaaaacattgtgaattttcagaaaaggggtttctttacgatggatgaaatagaaccaaaaaagaaatatattacctggcaagtccttgctttaatggattttgtgaccgtcattggatttgacgatattatttataactttcaaaaccaagggatggcagttgtcttctcatggattgtcttactattcgcctatgtcctcccttatgaattaatggttggtcacttaggctctgctttcagtaaagacggtggcggtctttccagttggatgcgccatacaagcggtgatgtttggggttacttaaccgcttggtgttactgggtagcgagtttgccatacttggtcgatgttgctaattcaatggtcgtttccttcttttggattattactgggaacggaaatcttgaagacaagctctcacgggcttcctttgcgcttttaacagccgcaattaccatcctcttcatcttcttccaacacaagtttacatcgtctctacaggtactcagtatcgttggtgggggggcgatgtttgtcatgaccatcctctttgtcctaatgacctttgttggtttattgaacggtggtcacgttgccacccatccattaaacgcacacaccttcattccaaaatttgatttacattacttctcaaccatcggcctcttaattttcgccatgaacggtgccgaacttgttgcaccatacgttggccaaatgaaagatggtaaaaaagattttccaaaagccatgatggccctcgctctaatgaccgccttcctaaccatcttcggctcattagcaatcggcgtcttcttcgatgccaaccacttaccagctgacttgaagatgaacggttcatactacgccttcttagcccttgggcaacaattccacatgggtaaagtcttactctacatcttcgctgttacccaagcgatttacatgggcgctcaattagcgatgctactcgatggcggcacacggattttcttatccgacactgccaaacaattcttaccaaaagcactgactaagaccaataaacaaggccttccaatcaacggttactggttgaccactgggatttgtacctttgttttagcatctagtgcctttctgcccgagattaacgacatcttcaattggttgttaaatattaacggtatcgtctcaccatttgtaacttgtttcatctttgtcgccttcttacgggtccgtttcaatagtgaaaaattcccatcagaatacacatacattaaaaacaaaccatgggccatcatcgttggcttctggtgtttagccattacagcattaggaacgatcttcagtatcttcccacaagatgccacacctggcacagccaaatatacacacgaattaatcttaaacatcgtcgtctcagtcgccttaatgggcctcggcgtgattttaccactggttgcaaaattccaaagaaaacgagcagcctaactaaaaaagattcgccccatatgggcgaatctttttttattgcctgggaaatgttaataaatcataaagccatctggttcaatgatggtcgctgctgtttgctgctgaaccccttcagacagaattggtgtcctcattgatgcaacactaacggctgtttgacctgcattaaaaacagccgtcaattgttgctcacctaatcgccgagtcatttttaagacgtcgggatgagtcggctcaattaaccactcaagctgtccttccgacaatagtttttgcttaccatggcgaagcccaattagctgcttaacgaactgatacatggcttgatcttggtccacgggatcccacaccatgcatttacgattagcaggatcgtccactcccgtcatgccatactcatctccataatagaggcatggcacacccggctgtagatacataaaagccatcgtttgacgcatcaagcgtcgattgtcgttggccatcgttagcaaccgcggcgtatcgtgcgaatctaggatattaaactgcacctgattaatttgatcccggtacagcattaactgtcgattcagcttcgaaaccatttggtggagcggaatttttttatgaataaaataatccaaaatcgcatcagtgtaggcgtaattcatgactgcactaaactcgtcaccgctgagccaactctgcgctgaatgccaaatttcaccaagaatatagaaatcaggtttagcagcatcacacacctgtcggaactttttccaaaagtgatgatcaacttcattggcgacatctaaccgccaagcatcaatatcaaatgcttcaatccaataccgcgctatcgataacaaataagcttgcacctctggattagccgtatttaattttggcatgtgtggcgtcgtggcaaagacatcatatgtaatgtctgtagcatcttcgaaattccgacctggctgataacgcactggaaaatcccgaatatggaaccaatcagcataccttgaagccgcgccattttgaatcacatcttgccattgtggtgattgatcgccgagatggttgaagacagcatctagcatgaccttaatccctctttgatgacaagcagtaatcagctgccgtagcgtctcgtcattgccaaaatgtggatcaaccatccgataatcacgcgtatcatatttatgatttgaaggcgccatgaaaattggattgagatacaatccattaatccctaacgccaccaaatgatctaaatggtcaataaccccttgtaaatcaccgccatagaaatcttgagcctgtggtgcctcatttgtccacggtaatgttccatctggatcatttgtcggatcaccatttgcaaatcgttcaggaaaaacctgataccaaaccgtttgtttgacccactctggtaccttagcccgatcaatttcttggaaatagggcatccgaaaacaagcatctgttttaggtaagattggaccaggcccctgatcaccataaaaagtgctggtcccgtccacaccaatcacttgaaaagcataggctaatcggcggcgatcaatggtcagttcaatcgtccaaaaacaagcgagatccgttattaagccttgctgcatccgaatcgttttcggttgccaactgccatcgactaatatataaggatccccatacactaggtacactgcttcaacgtcattacttgccgtccgcaatcgtacccgtagcctatctggctgatataagaaagcaaactcactatctggtcgatgataaatcgctgctaaatccatttgtctcctccttaaaaaaaccagtccaacacacacccgaaggctcggttgcactgattaattagtgttgatactgttcaaaggcttgttctaacaaatcagccgttaacgccgccgttgtagggacaacaaccgccgctgctgataattcgctcgcatgaccaatcgcaaccgaaacagcgcctgcagcattaatggcggccacaccagctactgaatcttctaatccaacgcattttcgcggattaacagcaatcttctgagcagctgcgatgaagatatccggggctggtttaccttggtgcacgtcattcggattaacaatcgctgtaaaatatgctgataaagctaatcgatcaagaatgagtggcgcatttttgctagcagaagcaatgaccattggcaccccgcgcgcttttaatgctactaacaacggttgaatacccggtaaaatatcggcagccgttaattgcttgatagcagccacgtaattttcatttttttgagtcgccagtgctgcgagttgtgccaccgtatactggccatcaagttgggcaaaggccacaattcgttgcaaggatgcttcccgactaatcccttttaactcagcttcaaagctatctggtaagctgacgccaaacgcttgttgcgccaattgacgccacgccgcaaaatgaaatcgggctgtatccgtaataaccccatctaaatcgaataagacaccgtccataataacctcctattccaacatcatcgacgcatcattgacttgaattgccaaacgatcgcccttgagtagtttgatatcagttcggtcggccgtcacgctaattttcaacaaccggccgcggaagttaatatggaattcataagccgtccattttttgggtagaaatggtttgaatgataattgtccttcatcgctaattcgcatgcctgcaaaaccttgcacaatcgctaaccaactccccgtcatcgacgtaatgtgcaatccgtcatcggtatcattattgtaattatcgagatccaggcgtgccgtccgcgcgtacatttccaccgctttatcttcgtaatgcagatcagccgctagaatcgcatggaccgccgctgataaacttgattcatgaaccgtcaacggttcatagaaatcaaaattacgcttcttttcagcagctgaaaaacgatccataaaataccaaatgccttgtagaacatcggcttgtttaatgtacggcgaacgcaaaatcttatcccatgaccaatgttggttgatgggccgttgatctgctgggattgcactgacaggctggatatctttatctaaaaagccatcttgttgaagaaagatcccgagttgttcatcttgtggcaggtacattttttcaataatcgcttgccattgtgagagttctgcatctgaaagtctcagatccgcttttttgttatcgcttacttttttgagcgtttcaatcgtataactaagcgtccattgcgccaataaattcgtataccagttattgttaatattgttttcatattcattaggccctgtcacaccgtggatcatataccgctgcgcacgttgtgagaaatggacacggtctgcccaaaagcgtgcaatctcagttaacacttcgataccttcattgagcaaataagtctcatcgccggtgtaacgtgtgtagttataaattgcataggcgattgtgccattgcgatggatttcttcaaatgtaatttcccattcattatggttctcaatcccatcaaaggtcaccattggatagagcgcgccttttaacccctgttgccgggcattgtgttctgcacccgacaattgattatgccgatacttcaatagattcaacgacactttcggatcagccaatgagagataaagcggcattgcaaaaccttccgtgtcccagtaagttgcaccaccgtatttttcgccagtgaatcctttaggaccgatatttagacgctcatcttcaccataaaaggttgaaaaaagttgaaataaattaaagcgaatcccctgttgggcactatcatcaccggcaatcaccacgtccgccatctgccaccgtttcgcccattgattcgtctgtgccgctaataattgctggtaactttgttgcgcaacgacctgcttgatacgttgcatatttggtaccaagtccaactctgaataatctcgagaagtcaccactaccgctcgtttttcaaaattcaattgcgttttaggggccaattgctgtttaaaacgttgcccaacttggtgggcttcttgaagcccagtatctgccatcattgtcgtttgatgatcaatttgaacccccacactaaaccgtggtaccccgaaatcgttgggcattgtttttccgaccaaataagtgtcatccgcagcgtctgactgctcaatcacttgccagaattgctcaccgtaattcgcatcctcattttgaacatcagcatcgatcatagaactaatctcaatctcaactgcttcgctcgccaagttttcaacagtgtagcgcaatgcgcataattccttttgaacgatactaacaaaccgctctatcgtaacttgcacttgtttattatttttagtaacgatgaattggcgggttaacaccccattatgcatgtcgagtgccaacttaaatgcggtcacttcatctttgcctaaatccaccgcttgaccatcaattttaagattcgttttgatgaaattgatggcattgatcactttcccaaaatagtcaggataaccatttttccaccagccaacgacggttttatccggataccagacgccaccgagataaatgccaggcaggctgtctcctgaataatcctcttcgaatacgccgcgcatccccatgtaaccattaccgatactcgtcatactctcttgtagccgtttatgtttacgatctagttgatgcgtgacaatctgccacggatcgacttcaaaaattctctccatttcgttccctccgatacgtcagccaaaatcattccgcctatttagcagcgcttaatagattgtttcttccgttgcaatgtcgaagtagtgtgctttagacatttcaagcaccatctcaacccgatcaccaggttcatgataatcccgcgaattaacttcagcgataaaatcggtttgtccaatctttgagtagagcattgtgttagcccctaataactcggaaacgacaacctctgccgttattttagcatctgggaatgtttggagggtaatttcttcagcgtgaatatcttccggccgaatccccaagatcacttgttgaccatcgtagccaccggcaataagctgtttcaactgaccttctggcactgcgatatttagaccatcgtcattcactagatgcccattagttaaggttaccgtgaagaaattcgttgctggtgaaccgataaagcctgccacaaacttattaaccggatgattatagagttcagttggcttgccgacttgctggattttaccatcgttcatgatgacaatccgatcagccatcgtcatcgcttcaacttgatcatgcgtcacatagatgaaattacgacctaagcgttgatgtaattgcgcaatttcagtccgcatttgcacccgtaacttggcatccaagttcgataatggttcatccaataagaacaacttagcatcacgaacaattgctcgtcctaaagctactcgttgccgttgcccaccagaaagagaagatggcttccgatctaaatactccgataaacctaagatttctgctgcggcatcaacccgttttttggtatcttgcttatcattcttacgaatattaaggccaaacgccatgttatcgaagactgtcatatggggatagagcgcatagttttggaaaaccatcgagatatctcgatccttaggtgcaaccttgttcatcactcggtcgcccattttaaattccccatcagagatatcttctaaacctgcaatcattcgtaaagttgtcgatttaccacagcctgatggcccaacaaatacgatgaattcaccgtctgcaattttcaaattgaaatctgtgacagaattggtatcatttcctgaatattttttattgatatgatttaaattaatttcgaccatcgatcatttctcccttacttcgtttttaactggtgcaccgttcaataattgatagctaatgaaggctgccaacgaaacgctcgcaacaagaatcataaacgcgagttttaaaaagacattaatgcccatcaacaagatgaaaacgccggtggctagcactaatttgcccccattggcaatgataaagccgcctaaggtaacatcatggcgcgctaacccgaccaagtagcttctggcaacgacaactagcaataacgccccaaaccagaccaataagccgctacgaactaaaatatcgcctacactggcttttagtaacaacacgatgatcatcaatgccgtcgctaacgtcagattcactaaaaagtctggcagtgcctgccgccacccttttaacacaacgcgtgcataattaccatcaccgttaacttgccattggtctaccgctctaaaaaccgcgactaaacttggtagtgtaaacaaactgagcattaacactagcacaactgcaccgggaatcattactcggccgtttggcatactaaacgttaaaatcagtgtcagaatgacaggaaaattaattccaaaccaagcaaggttgatggtaaaaagcgaccataaccaattcccggctgccaataacgtttgtcttgtttcgctgtgctttttcacgatcaacacttccttaattatttaacggcgccatctgtaacacctttgataatccatttttgagcgaataagtagaagacaatgaccggaataatcgacaaggtaatgccggctaatgcgaggtgccattgtttcgtgtattctccgaagaaattaaacatttgtagtggaatcgtatattgcgcttgtggtaagaccaatgatggtaaaagataatcgttccagatcgcaatgatgttcaaaatagcgaccgtcacagtcattggactcaacattggtaagatgatcttgtaataaatttgccaccgactggcaccttccatttcagccgcctcatccattgcaatcggaatacttgaaagggtgccttgatataggaaaatcgataaactacagttgaagcctaaatacatgaacatcaagccgtacatattcaacagatgcacattaccgaagtttgccgtcaacggaatcataactgattggaatggaatcaacatcgctgagatgaaaagcagcaataaactgctactcaacttcgatttattccgttgcagtgcataggctgccattgaagaacataggataatcagcaacacactgcagactgtaataatgagcgaattggtcaatgaactaatgaaattcaatgctttaaacgaatttccatagttcacattcgtgaatggattaggcagcgacaatactgaggcaaaaatgccttttggtgttttaaatgagttcgttagaatcatatagaatgggaataaccataaaagaccaatcaatacaccgaggacgccgatccaactatttcttttcttattcattagaaatcgccctcccgtttacggttataaaagacttgtactaaagaaatcgcagcgacaatcaagaagaagaccattgctttagcttcagcgagtgcgaaatcactcgaattataggctgtattcacaatatccatcgccaacatttgggtcgagttgtaaggtcccccgttggtcaacgacaagttttgatcgtagattttaaacccattcgacagagttaaaaacatacagacggtaaatgctggcgcgatcattgggaatgtaatccgcgtaaatcgttgccaagcagatgcaccatcaatttcagcagcttcaatcacttcacttggaatattttgcaagtaagcaatatagataatcatgatgtaaccactcatttgccaaaccgtcacaattaccaagccccaaaaaccagttagtgaattcgttaaccagttttggaaggcagtcatgtgtaaggcagatcccaaagcgctaaagccttgcgtgaaaatgaattgccagataaatcctaagattaacccaccaatcatgtttggcataaagaagatcgctcgtaagaaattgttgcctttaaatttctgtgtcacaagtaatgctaaccccaagccaattacatttagcaagatgacggtcacgataacaaaagctaccgtgaaccaaaaggcgtttccgaatgctttatcttgtaataaggccatgtagtttttaaacccaacgaccttagtaaaagagagtccatcccagtcagtgaatgaatagaataggccctccagcattggaatgaaaacgactaatgctaatgcaacaagggtaggggttaaaaataaccaaaatgataaactcttatttttcatttcaataccctctttttgttttatccaattgaataaatttatttagtttgttgttttgtccaaccgtccttcatatttgaaacagtcttttgccaatcttggtcacctgatagatatttttgtaggttaggttgggcaacgtctggatcccatgatgtgccagtataacccgggaaaacccagccgaatgttgctttcttttgactgtaatcatagaccgattgtgtgagtgcatctggcatcttcacatcaccgtaacctttataagcaggtacgaaatgtaatttctcaacaacgtcttttttaccttctttagacgtatatagccagttcaagaagtccttagctgctttttgttcgtcggtactcttccgtttattaactgcccagtagattgaggtcccaacaggcatcttaccttgttgttccttaactggcattggaatcatgccgatcccgtcttgagcgaatttcgcatcaatttggttaacggtttcgtaaatccagtcgccttgttgaatcatcgcaacttttccttgagcaaagttttggttcacttgtcccgcgtaatccatttgcatgactggttgaacggaatattctttttgcaaatcaatcatttgtttcatttctgcattgttttcaaacttcattttctttgaggtatacaatttttgtgcattgccatcaaattctttacttagataaacattcaacaaatgatctgaaagaatccatgattccttaccaggtaaagcaaagacccctttaatgcctaattgttctttttgttcatttaatgttttaacagctgcttctaatttatcgtaagtcgttaagctctttggatcgataccggctttttcgaagacagctttattataaacaaaaccatagccttcaatgttaaatggcaagccgtaaactttcccttgtgacttaacagtatctagtgtgcttggaatagcggccttagcagcttttgtatccgttaaatcagccgtgtagttcttgaattgtttaaccgatgctggcccatctaaactaaaaatagtaggtgcattcccggatgaaattctcgtcttcaaaacgggattatactgtgtcccaccaccgattgatgtgatttcaatcttgacgtttggatgtgctttttcatacttcttcgcaatcgctttgaattgcttgttggattccacttttccttgtaggattgtgattttcacattgccgccatccgcactcttgctcccacaagcagccaatgttaacgttacaccagccaataacgaaactaaccctagctttttccacatctttttcactataacgacctccaataaatttttatcagtgctgtttacaagttttattgtcgtactttgaaaacgcttttacaaatgttttcctgatgttaccggtaacagttttcttatgcttattccgattgttcttttagcacagggcgaattgtcccgcccatttcaatgtgtggttcgaatatcaatggtcgctcaatccactcctgattaattttcttgaggatattctctccgcatgcacggcccatttcaatgatggactgcttaatcgttgtcaacttaggagaggcaacttgatttaaaaagaccccatcaaatcctgtaatcccaaactcttgcggcacatgaccaccacacgacgcaatcccccgttcaatcccaattgccagacgatccgtggcacaaataaacgcagtctcgagtttgaattgcgcccagtgttcaatgatgtaggcttcggtcaaatgactatggttgttaaaatggtgtaactgaacaggacgctgctgctcatgcattaattgtaaataaccggcttcacgtgatttttcaaacgcttcttcactcgccattccaatataaataagctggcgataaccacgctctaatgctaattgcgctgcaaggtaggtccccaactggttatttgtatccacataatcaaaaccgtactgattctccccaaaaacgacgactggctttgtcagatcgcgaatccatgcaacatccctttcacgcaatcccgtaataatgtagccatcacaattcccgatatcaaagttacgccgagttactaactgcagcgaatactgatgtaggtcaagtgccttagcaattccgaccattagattcatgtaatatggttcggtaacgtcgatgtcttccaagatacacaatttgatgattcgggtactgttgctgactagggctttggcaattaaattgggacggtaatccaattccttcattgcggcatacaccaattccttcaattcatctgttacttgttccggatgattaatcacccgcgaaactgtcatcttagaaacgtttgcccgcttagcgacgtccattaatgttgccatttctccaccccttaagttcaactttttatattctttcacaattataccaatttatgcataaaatgattacgatttaccttattggtattaaaaaaggccatcatctaaagatgatggcctttcccttttttattctataattgtttgatttatctgccgtaagtactccaagtccgttgctttgatgccagtatgcttagtaatatctttttttagcgctttgtacttgcggaggccttcttcagttgcttctaaccaaacattccgttggtcattttccatatcacgaattttgcgaataaactttttactttgtagcgtattgattttacgggaagccgctggtgcggaggtcccaaatacgactgcaatttggcctggggtgttccgtcctagttccacaatctgttccaacacgagaaattgatcataacttaagccatgtttttcgctcattttattcaattgagtcgtgatgttctgacactccagataccactcactaattgttaatattcttttattatctggcatctgcaaccctccaccgtccattcaatatagttttaacttatgtacaataaatgaccaccggctagtcaaaagccgacaatcatttatttaaaacaaactagcgactcatttcaacttgattaagcagcagttaaggttagtttatatcattgtttggttatgtgcaagtatatttcacgcgacaataattgtcaatcgttcattaaaaaccttttaaaaccaatgtttgagcgatgtttttcggattattttaatttgtagataaatttacgcattttctgaaaacgccaataagaacctttgatgcgaaggggtcacaactcatgagttatgacctagtttatttttataaaaatcaacaattaatgccgataattcatttgcgcaactattttatttttcgtctatccgttgctacaattggtttttggccacaaaaaaaacgaagttcagttaattcacgaacttcgttttttgtgttaaacgactggatatttattttttaaatagtaataaaagggcaatccgagtaatgtaattccgattccgattaaagttaacatcgtctgtgtgaataatgtattcaccacgatgaaaatcccaccaagaatggcgatgactggaatcactggataaccaagtgtgcgatacggacggtttaattctggttcacgtttgcgcagaatgaacacagcgataaacgttagaatatagaaaatccagatgacaacaactaacatatcagtcaatgtattgaagccacccatgaacatcataacgatggcgatactaatttgaactaaaccactgacaaccggcgcgcctgttttagaaagggagcgcagttgtcgactgaatggtaaccgattctcgagcgccatcgcataaggaatccgcatcccagtcatcgtgtagccgttaatcccgccatagacggaaattaaaatcccaatagtgatgattttaccacccacaccaccaaatagcactcgagccacttctgaagccgcattcggattgccggcaatctgattgattggcaacacaagaacgaagacggcgctcactaagaggtagacaaccatggttcctgttaaaccaattaaaattgaccgcggcaaatcgcgttccggatgcttcaattcacccgcaatattcccaacgtgaatccagccatcatacgcaaagagggttgctagaacaccactgcccagcgctgacaggaaactccccgagccatttgaccgggtcacgtcaaataatgacacatgaacggcgttgctgcctggatgaattaacccgaatacaataataatcgcaagcgggattaatttaaagacggttgtgaaggattggaatagtcccccaacccgggaaccaaagaaattcaagattgttaagctgagtccgacgatgattgcaattggaatctgccagtgagctgaccaactgaataagttaatgcattgcgttgcaaaaacaatcgacaacgccgcaatgttcgctggaaagtagactgttgtttcggcccaacctaataaaaatgccgctaaactaccataagtatggtcgatgtaccgcatcatcccgccagtttctggaatcgcagctgctaattcaacagctgtcaatccagcacaaattgtgattaagccgccgacaagccatgcaagcattgtcagcccggtggagccggtcgcatgcgtcacaggatccgctttaaagaacacaccagcaccgatgaccgttcccatcacagtggctaatgccgcggtaaatccaatcgtttgatttaatgcttgtttttccgtgggcatcttaaccgcctcctaatatcatttataatatttattatgacatgttgaaagcggtctttactagtctaatttgcaactaaattcggatatgtgcggcggaaatcttccattgcaccaatcaagttcgcatcattatgatactgacacgtccgaatggttggcatgaaaggcgcaatatcgacttgcttgagtatttcctgtaaagctttttcaatatttggcaccaagaaatcggcctgcgacaccccaccacctaaaataaccgcttctgaatcaaaactatattgtaaattatagatggcttgtgcgagattatcatagagcacctgtgcctccttttgcgcgagtaaatcgccttgatcagccaattcaaaaacttcacgccctgagtagttagtatgtgcctcttgattataacggtcagccatgtgaacggcggtcccgacttcacttaaaatccgaccatcattcatcatcatgtagccaaactcaccaccgaataaatggcgaccatgttggacttgtccgttgacaatcactgaaccaccaacgccagtgccaattaccatgaacaacacattttttagccctttagcagccccactaccgacttcggctaaagccgcgcaattcgcatcattttccattacgactggtaagtcaaagcgcgtttcaagttcatcttgaatttcaaaatgatgaatataagggagcgcactggccccttcaataatacccgtcgccttgttcactgcacccggcgtactcattgcgaccccaacaacttggtcactagccttaaactccgccacaatctgcgtcagcacatcataatacgcattcaacgactttggtgtggcaacagccccttgtttggtcaattgttgcgccgcaccatcccataaaccatatttaatcgtagtgccaccaacatcaagtaatgctaaatttttcattcgtcaatcccccaatcgattctcttatgtattttgataaccgcttacattctaccataaaattacgctgggcacccacaacagtgttaattattggcgtacacgctaaaggcgaactttggtttttaatggctttcatggtacacttaacggataaggtgggtaaccacccatttcacatcaaaggagcgtcaacaacatgtcaactaacgtttgtttaatcgcaatcacaattgaataatcatgtggccattttgcggctatttctgttggcattcgctttttaaatttaattaactgagggctgtgacaaaagaatatttttgccatggccctttttttcaattgaaacgtgctccaccaggcatctgctctcggttagctacgtcagccaaataaccaacaaatcggtttttcgtctgcctatgctaatcctcagcagataaccgccggtgccgcactcttatcttaaacgtgctttcttcaaatagccgtctgcgtttagcgccatctcgtaaacaatcggcgttgccgctcatttacgagatattgctaatcctcaacggctgaccatttgaagacgcactctcacaaaaaggagatctcatggaagaaacttatatgcaacctaaaaaggttttaatcactggtgttagtcaacgccaagttaattttgactatacaatgcgcgaactgggcgaactagcccgtgccgataacttagaagtcgttggtgacgttcgccaaaatatcgaccaagctaatcacgccacttattttggtaaagggaaggttcaagaaattaaagaacgcgccgtcgctgaagatgcggacattatcttgattaacgatgaactttcaccttcacagattcggaatttagaaaaagaactcggaataagcattcttgatcggacgcaattaattcttgaaatctttgctagccgtgccaaaacaaaagaagcgcaactccaagtggccatcgccgaagcgaaataccaattaccacgcctccatccttctgaaaacaagttggatcaacaaggtggcgggggtactgcgaaccgtggggcgggtgaaacccaacttgaattggatcgccgactcatcgaaaaacggattacgaagctcaaagccgaacttgctaaaatcgatcaacaacaactcgtacaacgccgtcaacggacgaaaaatgcgattccagttgtcgcactcgtcgggtacaccaatgcaggtaaatcaacgactatgaatcgaattttacaacggttgaaccccgatacacctgaaaaacaagtttttgaaaaggatatgctctttgccaccttagacacgagtgtccgcgaaatcgtcctccccaaccaacagaaattcctgttgagtgatacggttggtttcgtcacaaaacttcctcatcacttaattcaagcctttaaatcaaccttagctgaagcagcgagtgctgatcttttaatccacgtggttgattactcagatccaaactacttggacatgatggaaacgacacaagaaacccttgaatcactcaacattaaagatatcccagtcatcgaggcttacaataaagctgatttgaaaccagatacgcgctatcctgaagtagacggaaaccaaatcgtttattcagctcgcgacgaagtagcaatcgatgcattgattgccttaattaacaaacaactctttgaacaatacccaacgctcgacttcttagtcccatacacagaagggcaagctgtttcgtacctcagtgatcgtgccaatatcactaaacaaagctatgaagaagatggcacgttgattcgtgcacaaatcaacccagacctattaggacccgttaaaaagtttgttcaagcatagccaagcgctactttgcggcaaacaaaaaagcccatcgacataaatgtcgatgggcttttttcaatttcttattgatactttctgaaaaacttatctgaagctgcttttaagctttgaatttcttttgaatcaatattcattgttagctgtgtagactcttgagcataagccgctgcaatctcttgcaaaccaactaatgctttccgactgagcgtcacatagctttgtggaatctcattatcctgaacgaataataataaacctgcagcttttaaacggtcgatatcattttctgaaaccccgattgaatgaagggtttccaaatctgcgcgttaatcatcggctagttgcttaattcgttgtaatagcgcggcttcatcaagattaaactcaactttttcgcaaatcatatctagcgtttcaaaatattgcatgctagcaacactagcgtgcaatgtattgataatttcatcgactgttttttctggttttaaataataaatcgtcattttattgtacccactatttttattaggattaaaacacttacttgattgccttaattctataacatttgtggatgaataaaatgcgtatattttaaatagtttaaaaatccggcgaaagataaattaaaaattttatatttaggtagattgtaaaattaatccgaacgctgttcggacaaaaaagatcagcttcctttaaaatggtgtttaccacaaacccatcttttaggagctgatcttttgtctagtataacctattccgaacgaattaaaatcgaaaccttttgtgaactagggctgtccaatatccaaatgggcgttcggctgaaccgatcaccgtcaacaatttcttatgaattatctcgatgtcaaccttatcaggctgaattagcacaaacagatgccgaatacaagcgatcacgatgtggtcggaaaactaagctgagcgatgagttaaagcaaaaaattctcaaccatttacgtctaagctggtcaccaggaatgattgctcacgaatttaaactagctactaaatctatttataattggctaaatcaggggagaattggtttctccttgaatgatctacctgaacatggcgtacgccaacggcgtaacgttgaccaacgatccaaatataatcaatctttggggcgatcaattgaacagcgtcccatgatgattaatcaacgtaagcgcatcggcgattttgaactagatacagtcgttggtcctcgtgggcatagtaaggcagttttattaactttaatcgatcgcaaatcacggttcctttgggcataccggttaaaagatcggacgacagcgactgttaatgaagcactaactaagttcctaaccacttttaatggtccggtgcacagctttactgtggaccgtggcactgagtttagtgggctagtatcacttgaatcacaatatggtattaagacctattactgccatgcttatacgccagctgaacgtggtagtaatgaacgctttaatcggaatttacgttatttttatcctaaagggactcgttttgagcacattagtgctcaagatttaacgacgacgttactccaaattaaccagcgaccgcttaaaatactcgactggtaaacaccgtatcaggttatgctgacaaatttgtccaaaaattcggattaaatttgcaatctacccaataaacaaattaactgtacccaacgcagtggcggttacatcatccgcgtcatttcgctctgatgataactcggctcgctgcagtgctagttgctcatcaagccgcagttgttcctgctcttgaatttgaaataatcgattcttcggcaatcgccgaccgacaaaggcgtgggcaatgaaaccgatgattggcaagaacaccagcaccagtagccaggcccaggtcgctgaaatatctcgcggttcacggaacacagtaatgaacgccaacaccgcgtttacatagataattgtttcaaaaataaaatgtgcccagttcatctggattggtcctccaatacgcataaatgctaatttcatcttactcatctttaggaagcaacgcgacccccgtattgtcaatctaagtgcaacagtttctagtctaatcctataagtggtacacagcttagagttccggcatcagttccgccgcactccggtagcccaagatacgacgaggccggctgttgagtgcgtcctggaagctctgaatatcaatgatgtcgtaatggtggagtgagcgacctttcggaataaactctcgtagaaggccgttctggttctcatttgttccgcgctcccatggtgagtacggatgagcaaagtagacatcagttccttctactgaatctagttgtgcgaactcactgccgttatcaaaggtgatggtggtgaagtattccgcaccgtaatcatcaatgatggactgaagtcccaccttacaggtacttgctttgtagttagcgagcttgatgatgatttcgaagcgactcatccgctctgtcaaaaccagcaacgcaggttcgctatcaacgcgcttacctttcactaaatctccttcccaatggcccccttgccgacggtcttgaacttcaatgggtctttcatcaatcgaggtaccaagcttcgtcttattggtgcgggtatgggaatggcttcgtttaattcgcaagttggatttgcgcggtaagtcgtgggtccgtagttcgaatctaccggcctcaatatcccggtaaaccgttggtgttgaaggaacaacctcgtctgcgtgttcccgtttgaaggtgtgcacgaagctgtccacactgtgtacgcgtggacgttgcttgatggcagcggcacaggcggcgtagaactcggggttcttctcaagcatcgtcttggggcgacaccactcccgccgctgagcgtgcagataagctgccgtatcagcaaagtaaatcaacgctaccttatgcccgggaattcgctgtagaacgaagccacgagtgatctcacgcgaaatagtactacgagagcggttgagttcgcgggcaatccgtgcttgggagaatccctgattgagcagagtttcaatgcgaacgcgatcaaaatttgatagttgttggtaagccttagagctggtacgcttgatgttggtcatgatgtgcctttcttatgtgcttggttgcttataagaataggtcatcatggcctttttggtctatttaattatgtgttgcacttagattgtaaacgcgggtcttgaatataaatagcaaaattgccacaatcacaatcaacccatccatcattcttagaccagcaattgtggataactgtgtcatccgactagttaccaagatagtttctgcgattacgatcaagacttttgagaacttagcccatatcgttgtcactgcggaaacattcatcaatgcgtcaacagacgtttgatagacgactgcagcttgttgcaacaataaaacatccggcagattgcgccctgtctcccagttagaaatagcctgacgtgaaacatttagttgtttagcagcctcagactgtgtgagccgtaattgattacgtgccctctttaaattggccgagagaatttcaccttttgtttgcatcatcttcactcctaaaaagtaccagtagcttgcttcattgacgagcaaggaacgcttgcatccgcattagcacagtgtttgtagaccaaaataaaatcataattgctaagttatacattagcattgatgtgaatagacttgtaccatttttttatctacgagtatctggtatttcaaagaaattgtctactatctcagcgacggggccgtcaacagtaagcacagtaactaggcggctgcatttgaagcttgaacagaaagctttgaacaatacttttacacacacagtaattggtgataaattatactcaaccaaacgaacaactactggaggtgcattcatgaaacccgaaatttctaaagatatcattcggggacacacgacgaccatcattcttaatattcttagccagggcgacagttacggttatgaaattgctaaggccgtccgcgaactgagccacgatgcatatgaattaaacgaagccactttatacactgcttttcgccgcatggaacgcaatggtgatatcgaaagctattggggcgacgagactcatggtggtcgccgaaaatactataaactaaccgaacaaggtacccgcctactcgcaaaaaacgtcgcagactgggcgtttgcaaaaaagattattgatgacctgattaccgggaggattgatgacaatggacacaattgatacgatggttaaccggcgtttggatgaaacgtttaaggcttatcctgacacggaagaaatgcatgaattacgtgaagagttggctgctgatttaagtgaggtcgcccacgacaatgaaaaaaaaaggcgccaccatcacggacgccgtcaacagggcttttgaaggattaggcaatctcgacgacttagtggatgaaattaacgccgaaaaaaatgctactgatcaagatactcattccgacgatgccaaacaaacgtcacatgagcatgcctacaatcacggtcaccacatcgatattgctgatggcaaggtaattatcgatggtggtaaggtgctcatcatcgatgacaatggtattaaagttaacggtggcaaagcggtaaatattgatagcgatggcatcaacatcaataacggtacgtttactgtcacaaacgacggtattcggatgggtaatcttgtaatcgacaatcgtggcattcacacggacggcggcaaaacagttgccggttcgtttgcggaaaaaaagcagcaaccacataacgacaagttcgatccccatgccaatgacgacacattttcaaacttcgatcagcaatttaatgaacaagaaccggtcgatactgaaatctacgtggacagtttagtgcttgccaacgaacaacaattttctgccgatcaagttcagcgaatcgactttaagtatgctgacagtagcgtccgaattttaagcaatcccgatgatgatcacattatcttccgggaatacatgaaccgcgctaatgacagctaccttgcacaaactaagttggagaatggtaccctgtcaattcataacggatcacggcctcacctgttaccactgcgggttcgtgttcagctactcattccagcatcctttgcaggtgatttactggttaacagtgcctcaggtagcgttaatttcagccataccggcgctctgaaccaggttcgtttggaggcaaacagtggttccattcgcattaatggtgcccactttaaggatttagatgtcaacgcatccgctggttccgttcgcattaagcaaaccactgttgcggggctattacgtgctcgtgctcatagcggttcaattcgcttggctgacactacggttgctaagttcgatgtggactcacactcaggttctgtccgcggcactgacttgaatggtgctggtgcgttcaacgccaattcagggtcaattagcctaagtttcagtgatctcactggcaaccttgataccacagcgcactccagttcaatcaaactagaattcgctaagggcatcgagtataactttgacttggacgccaaaagtggttctatcaccggtcccgataacgctatctacgatcacaatacgactaacttcaaagatggtgcagttggtgatgacgacccacatttctatgtcaccgcagcaacaaagtccagttcgatccatgtttcttagtctcattaactggttaattgtttcaacatcatgtaatcaaagtaacctaaaacatcacgctgatattaaaaaatcagcgtgatgttttttgcactttatttagttacttcaggaacacgcactaaatcacgtttgatcagttcctgtgcgatttgaaccgcattcaatgccgcccctttaagcaggttatcagcaacgacccacatgtgataagctcctggattttcccggtctgctcgcatccggccgacaaacgtttcgccatgaccagctgcgttaatcggttgcggataaacttggtgtgctggatcatcctgcaatacgacaccctttgaatgagccaatagagcctgcatatctggtacggctggtgtttggttcgtttcaaaataaacactttcaccatggccaattggtacgggcacgcggacacaggttgcagataccttaagttccgtgtcgttcatgtcaccacgtaaaatctttttagtttcgtgaatcatcttccattcttcgtgcgtgaagccatcgtcctcaaagacatcaatctgtggcaacaagttaaacgccaatggatagtgatgttcagcacccttgacaggtaaaatagcagccgtctcctcttcgccttcatgacgttgttgggcctcatcgaataactcgttcattgcccgttgaccagcaccagaagccgcttgataagtcgaaactaggacttgatgcaacttatactggcggtcaattggcgccaacgcaacaaccatttgaatggtactgcagtttggattggcaacaataccatgatgctgactcaacatctctggattcacttcaggcacgaccaatggtacatctggctccatccgaaaggcactggtgttatcgacacaaacggctcctgccttcaccgctgctggtagcaatgccttggaaactgaaccgccagctgacgacaagacgatatcgatacctttaaacgagtccgttgtggcttcttcgatcgtataagattggccacgaaaggtgcgtgtttgaccagctgaacgtgctgatgccaacagcaccaatcgatcaaccgcgatatcagacttttccaattgttgtaacatccgtgtgccaactgcaccagtaacaccaagaattgcgacattaaatgattgcattaaattacttcctttcaagtttcactccactcgatcatttagttaagccgaaacatcaaccgataatttgttggcacgataggctgccagtcgtttgacagcttcctgcaatttgtccatgtcggcggcgtatgacaaccgaacgtggccttcaccaccaggtccgaaacagctgcctggaacaacggctacctttgcctgttgagcgaccttaagtgcaaaagttcggtcatcttgttcctcatccgccggtattttggcaaacacataaaaagcgccatttggttgatccgtggtaaagcccagttgattgagtgcctgtaccagaaaatcacgacgttcgtgatactgagccttcatggctgccgtgtctgctgccccatgttgcaaagcatcagtggccgccgccatcattggtgttggtgcggtggtaaccaaggcgccatgtagtttggcaatatgctgggttagtgcagccggtgccgctaagtaaccaacccggtaaccagtcatggcaaacgtcttggaaacgccattaatcacgattgtccgctccggtagcaatgtggaaatggatacatgaggctggtcgtaggctaattcacaatagatttcatcagccaacacgagcaacttatgcttacgaatcactgcggccaatgcttgcaactgcgagtctgtgtaagtgacaccagttggattggttggataattcaaaaccagcatctttgctcgcggatgagcagccaatgtagccgttagccgagccggtgttaatacatagtcatctgctgaggtatcaaccaacaccggcgtagcgccatcaatctgggcagtcgtaatgtacaacggaaaaatgggcgttggaataatcacctcgtcgcccgctcccaaaacagttcccatcgcggccgcaattgcttctgtggcacccactgttaccaatatttccgcttggggatcgtaagtaacctgattcaatttagttaagtatgtactaatcgcttctcgtagctctggtaacccggcagccggtgcgtaatgagagcgattctgattgattgcatcgatggtcgcctgcttaacatggtctggcgcgttaaaatctggttcaccaagcgttaatttcaggatgccaggaatatcctttatttgattatcaaactgacgaatcgctgatggcacaattttgtcaaacacgggccgtgtcatccccgttaactgagcttctaattctggcatatgcattctcctttgaccgtatcaattcgcggtacgacgctaatctaaaacctgttccaaaccaacctttaattctgttaatgtcgtcactttgctcaatgctagcttgacgccaaccataaatgactcacgatcatacgtgtcctgccgaatcgtcaacgcttcgcccgttccgccaaacaacacttgttcatgtgctagataaccaggcaaccggactgcatgaatcggaacgttgtcgacaatccccccacgcacgccatccacgctgctttcagtatggtctggatctggctgttgttgccgaccagcggcgattgcatgggcagtagcaacggccgtaccagatggtgcatcccgtttatcggcatggtgcatttcaataatctccgcgttcggaaaatacttagccgcctgtttagcaaactgggttagtaacaccgctgacaatccaaagttgggaacgatcaacccacctagatgagtggaagcagctaacgcctgcaatgattttatttgtgatgtcgttaagccactcgtgccaaccaatgggactaacccgtgttgcaaggctacttcaacgttgtgttcaaccacagttggcgttgtaaagtctaaccaaacgtccgcctcaggcaactcgtcttccgtagtagcaacgacaacttggcttggcaaatgtgggtcattcccgtccgttagtgcagcatgaggatcaaacacaccagtcaattcaaaccgctcatcgtttaaaattgactggcagctagcagtccccatactgccacgaaagccagcgacaataacacgaatctttgactcactcattttctataccgcctccgtgttttctgccaacggaatatcgcttagttggtgaacgcctaagcgttgtgccaaaatggtttgctcagtgtcattcagaggaacgattggcaaacgtgggttaccaactggtagtccctgcgcatttaaaacggccttgactggtgatggtgatggatatatgaataacgcagccatctttggcatcaagtcacgttgaatctgaccggcacgtgcaacattaccttgttctagtgcgtcgtattcctgtcgcatcgctggaccatatacgtgactggcaacggaaataacgccagttccacccagtgccttcactaataacgcttgggcatcttcaccactgtaaacggcaaaacctgtcggcgcatcattaattaacgccgccaaatccgcatcactaccacactgtttaacaccgctaatgtttggcacttgtgcaagctggagaatcgtttcgttcgtcatgttgacgccagttcggccgggaatgttgtaaatgacaattggcttagtagcagcttgagcaaccgctgtaaaatgggcaatcatcccccgttgattaggtttgttgtaataaggaacaacgaccaacgttgcatcaatcccgtcaatcgcatcgacttcctgattaagggcaattgtcgcagctgtattattactgcctgtcccagcgataacgacaccacgaccggccacaatctgtgcaaaacgggtatagagttcaatcttttcttcgtgcgttagcgttggtgtctcacctgtcgtcccaccgatgacaaacccgcgtgaaccagtttcaatgagcatatttgttaatcgcgttaatgcctcgaaatcaatatgatcatcttcggtaaacggtgtgatgattgctgttaataaatcgttttgttcaaacattttaaattcctccctattggtgagaactattcggaaaaccaccgaatcatttgttttgcttcttattgctcggattcaaccgaagtcgagcatcactctcttgtcatccgatcctccaaaaactcggtaatggcggtgacacccttgctaatagcggactcgtccggcgtcattttggcagagtgcaacggtgcgtgaccgtccacccctaaccaaaacatcgtgccaggaaattgatgcagcatatatccgaagtcctcgccggtcatggccggtgccgtttcaacaaagtccacatcgggtgcacttttcataaattgaatgaacgggatcgtcaactgcggattgttttctaccggcaagtagccgccctgattcagttcaacattgacttcacactcgaaactcgtagcgataccattagcgattgcctgtaatcgctgatcaatgtgttcaatcatcgcttgcgttagtccgcgaatggtcccttctagcctggcacggccagcaatgacgttacggatactaccggcattcagtttgccaaacgtcaccacgccgctttcaattgggtcaacgcttctagagacaacggtctgcgcttgcatgataaagctggcgcaggcaactaccatgtcgttagccaaatgcggataagccgcatgcccgcccttgccaacaaagtccacgttaatttctgtcgtaccagcaaataacgtgccattgcggcatccaatcacgcctgcaggcagctccggattgacgtgcaagccataaaactcatctggtcgccattcgccagcaaaggcgccagcctcaacggccaacttgccgccgttgtcgttttcctcagccggttgaaagaaaaacaataagtcatcttttggctgatgattggcaaaataattgagcacccctagggccaccgtcatgtgaatatcatgcccacaagcatgcatcttgccgggatttgtcgacgtatatggcaatccagtcgcttctgtaactggcaaggcatcaatatcagtgcggtatccaatacaccgttgcggctggcttccttgaactttaaccatcaaggccgttggcaaacttgggatgtgatgcatggtcaaccattgttgaggcatcgcttcaataacttgccgcagatatgcagctgtttgagtttcatgaagtgccaactctggaatttggtgcaagtgacggcgaatatgaattaaatctaacgtttcagacatgcagtaccagctttctttcagtcaaacgtgctagagctttcgtaacgaatcctgaagtttcgttttagcctgcgtttttgcatcgtttactttaatcaccttagctggaacaccggcaacaacggtattggctggcacatcctcagttactacagcaccagcaccaaccaccgcgtgttcaccgacatgaacgccctcgataactactgcattggccccaatcaacacatcatcatcgatgcgcacgggttctgcagaagccggttcgattacaccagctagcaccgcgccggctccgatatgacaatgtttgccaacgattgcacggccaccaagtacggcacccatatcaatcatggaatcagcgccaatctcagcgccgatgttgatcagcgcacccatcataatgacagcgtgatcaccaaccactacttgaccacgaatgatggcacctggttcgatgcgggcgttaacttcacgcgcatctaataacggaacagctgaattagtagcattggtttccacatgcgtttgcacaatcacatcttggtgtgattcaagaaatggtttcactaccggccaactcccaaacaacgtccccgtgtgatcttccataaacgcttcaatgccatctggaatcgtcagttgacgtaagtgatcgccactaacagtgaccttaaccggcgtttgtttcttagcagtcgctatcgtatgaataatctgtgtcgcatctaattctgccatttgaatcctccttaatgattgcgttaccttacagggcttcggtgccactcttcctaaacgtgcacctgtccgctcaaggccctgtgcacaacccaaagctgtcaccccacaagcaaagtgcgcttgcacgctgtcacctttacgttgttgctcgagccttaccgagcttcggcggcactcttcttaaaatcctcatccaatgcgagcatgtcgcggatggtttcacgccggacgacgatactggcttgtttgtgatcgataaaaatgacggctggacgtggattgcgattatagttgctggccatcgaataaccgtaggcaccagtagctaagagggcaatcacatcgcccgttttcgtaaccggcaacgtcgcttcttttactagaatgtcgccggactcacaatatttaccgacaatatggatggtttctttagacgaatcttccacatgattggccaatactggttcgtactcagcctgatacagcgctggtcgaatgttatcccccataccgccgtcaacagccacgtaaggcaataagctggggacgcgtttgtttgcgccaacccgatataaattgattcctgccgggccaaccaacgaccggccaggttcaatccaaatctccggcatttctaagtgatgattacctaacctggcttcaatcgtcgttaacacggtgtcaagctgggcctccggtgattgtggatcgtcaccttccacatatttaatgccgaacccaccgcctagatttagcacttgggccgaatagccaaacgcctcatgccaatgggtcaacagttcaatcaatttctcggctgccattacaaagccggtactctcaaaaatttgtgatccaatatgtgcatgaacgccacgaacatttagatgatcatccgctaaagcctctttcagtgcctgatccgcttgaccagaaccgatgtcgaaaccaaacttactatctacttgacccgtttgaatgtactgatgcgtatgagcactaacgccgggggtcacccgaatttgaatcgcaatgttttcgtcccgttcctgtagcaaacgttgtaatagatgaagctcaacgaaattatcaacaataatcgtgccaagatgatgatccagtgccattgtcagttcatccacagacttattattcccgtgaaaactcagtcgagatgacggaaaaccggccgcaaacgccgttgccatttcacctgctgacacaacgtccgcatgtacaccgagtggcgccaacagctgatagattcccttcacgcagaaggccttagacgcgtaactcacgacgccatcaattcggtggttagcaaacgtctgttgaaaggccttcacctgacgaacgatatcctgtgtatcgtaagcaaccagcggtgtgtcaaactgctctgctattttgacggtgtccataccaccgatcattaaatgatttgtcgttgagtcaactgttgttgtcatttttttgctccttttagtttttagaagttattttggttgtacacattgtctatgcgcccgacgtcctttcggattggtctgaagtgtgccaatgttgacaaccgaaagcacagaaacatagcacgaaaaaagggggctcatttgcataggtgcgtacgcaaaagagtcccgaaaataaattcatttcgtttctgaatgtcgtaagcgccccgcgatgaatttttcatcacgacagtttgttgattattcgtcaacatcccagccaaagcgatggtcaatcgtccagcttcggcaaccgcccctttcatcagtttctatgtcgtgacccgactccgctgattactcttgttggttgcaacctcttttcacatttaattttaatgagtatatcgctcttttcattacccgtcaagtccccatttaaattttatgttcccaagtaaagcgctgtaccaacgcgtttacatttattttcatttagctattgtaattgaaaactaattcgctataattgtcagtaatcatagaagaggttgcgaagattaaaagtaactaagagtaaaacgacgaggttaacgacgcttagtgaaaggatgattcgccgaaactttgactgactcgtctcagttagggttgggactcgggttaacagcccaaggactgtcgcaactaacaaaaaagttgcggggcgctatctacgaccatacataaccggtactatatcgattacgttcgattagactaagcgcacccaatgacctcgttaaacaaagtcattgggtgcgctttttaaatgtaatcgtgggtgtgaatgatttcagtgtcgattccccttctaacatcaaaaacaatggtctgtttggacaaacaaccgtggtaagcgaggttaggatcgatgaaagtaattaagtttggtggcagttctttggcagatgcgacgcattttagtgacgtaatgcagattttacgaatggataggcaacgccgcgtggttgttgtttcagcacccggcaaacgaaatgagaacgatgaaaaagttaccgatttactgattgactacgcacgtgcgcatggtaaaacacaacagtcgatcggtcagcaaatcatcgacagatatcaagaaatcgcagcagcgtttaatatttcggcagctcaatttaaaccattggcggaccaaattttggccctaccaacgacatcatttcgtggcccagcctttagaatggctgcgtttaaggcccacggcgaaaagttaaacgcccagttactggcgctggtgttaaatacacaaggattaagtgctcgttacgttgacccacacgaactcggcttaattgccacgcaggagccaaacaacgcgaccattttatctcagacatacacacacctggccgttgcccgtcaggagcttctagcggaagacaaactgtgggtcgttcctggtttctttgcctatacaaccggcggtcaactggtaaccttttcccgtggtggctcagatatcacaggtgccattcttgctcgtggtttgcatgcgactgaatacgagaactttacggatgtcgactccatttacgctgccaatcctaacgttgtcgctaacccagcacccattactaagatgagctacgtcgaaatgcgggaactttcatatgccggtttctcagtttttcacgatgaggcaatcattccagccattgaaggtcaggttcccatttgcgttaagaataccaaccatcctagtgcgccaggaacactgattgtaccaacgaatcaatcgcagcctaagcgattaattacgggggtagccagttccaaacgttttgcagcgctctacctgcatcgttatctattgaaccgggaagttggcttcacattaaagttactcaaaatcctcttccgctaccacatcagctacgaacatatgccttcaggaattgacgatttaacgatcatctttgatcgcaatcaaattccgacagatgtcctccctcgtttgctagcagatatcaaagaaacattgcaacccgatcgtcttcagtggatcgatgattacgcgattttgatggtggttggcgaaggcatgcgcaatcaggtcggcgtcattgaccggatcctgcacccactagccactcatcatatcggcgttcaaatgatcaaccaaggggcgtcacggatttccatcatgattggtgttcgggaagcgcaggctgatgacgctgttcgcctcatctacaatgatttctttaaccaaccagttagcttgccacttcgtcaaccagcacaggaggtcactcatggttaatttgattcgggttcatggttcggaaaatagtttttacctgcttgatcaacggcaacttaaacatgcactcaccacagccgaactcagtcgtttggcacaacaagtcaacgacacagcaccagcaagtctgggcgaagtagatggtgtcctggtcgtcagtgacagtcagcattccaacgcaatcggccggatgcaggttttcaaccgcgatggcagccaagcaagcatgtgtggcaacggcttacgaaccgtcagccgctatctcgcagaacaaacgcaccaaacggatttccaagttgaaacagatgtggctgatttaccagttcatcaagtcacgccgtttgcgccagatgtgcctgcattcagtgtcagcatccaacccgtcagtttcgatgcgacttcgattggcttacatcaaatcccgacaacaccacttttaaatcaaaacagcttgccatttgcaacaaattccactgcaaacttttccgctgtggcagtgccaaacccacatttgattagtctcacagaccataaccatcctaatgccttaacaaccgccttcctagggcaactcggacaacaattaaatggtcaaaacccgtggttccctgacggcgtcaatgtcagctttggttgggaaatcaacgacactaccctctttgtgcggacgtttgaacgcggcgttggttttacaaacgcctgtggtactggcatgtcggccacatcgctaatttgggtactgacccacccagccgctcagtttgaccaactcctgaccatttataatccaggcgggatggttcaaacgcgtgtccatcatcaaaacgccgcgtacactatcgacctaatcggcaacgcgaccttcactgaccatttgcgtttgagcgaggctgacttgcacgccgggaacctcgccagtgcagaagtcgcggcaacacaagaagagaccgcctatcatcaattcgtatcacagttaccgcattggtaatttggctatgtccgcccaactgcagacgaacactaagtttgctaaagagggaccggtttcgcagtctagctacgaaaccggtccctttctattgtgatagttattctctacaaaattggtgacaataggcgtgaaaatatttgtttgaacttacgccaatacgattgttgggcgaacgtctcgtaagtcgtcagctcactgacgcgcatatcagcctcaaacaacttagccaactctgcggtaactttaggatcgtacaggaatgcattgacctcaaagtttagtttgaaactacgaaaatctaagtttgccgatccaacagatgcgactccgtcatcaacgaccattgttttagaatggataaaaccgttgcgatatttgaagatttttaccccgttacgagacaactgcttcgcgtaatactcggttgcccggtacacaaacgcatgatccggcttgcttggaatcataatgcggacatccacgccactgccagccgctactcgaagtgcatcaaggacagagtcatctggaattaagtacagcgactgaatccacagccgtttgcgtgctgagttaatcaatcgtaagtagcccatcttaatctgctctttatcagaatcgggaccagatgacacgatctgcatgttggtttcgcccttcaccttagtgatatggaagaaatcattggtaacgtttagtggtttggtacgactggtagcattccaatcacggataaagcgtgactgaagcccgtaaacgccagccccaacgatgcgaagatgcgtatcacgccagtaaccaaacttttctttacgacctaaatactgatcgccgacgttaaaaccaccggtatagccaatagctccgtcaatcacaacaattttacggtgatcacggaagttcaaccggaaatccactatcgcactgcgcgtttgcaggaagggatatgcttccccaccagaggcccgtaatggatcatagaatttgggccgaacacccatcgaaccccatgaatcatataatacccgcacagccacgccggcttccgctttacgaatcagcaaacgcagcaattcgttaccgatgtcatcgttatagatcgtgtaaaactcgatatgaatgctctgtttagcctgctcaatgtcttcaaacatctggtggaacagcactttcccatcagaaataatgtgcacccggttgttgcgagttaaaaaggcttgatcagactcaatggtagattgcaaatttaatccgaatttttggacaaatttgtcagcataacctgatacggtgtttgccagtcgagtattttaagcggtcgctggttaatttggagtaacgtcgtcgttaaatcttgagcactaatgtgctcaaaacgagtccctttaggataaaaataacgtaaattccgattaaagcgttcattactaccacgttcagctggcgtataagcatggcagtaataggtcttaataccatattgtgattcaagtgatactagcccactaaactcagtgccacggtccacagtaaagctgtgcaccgggccattaaaagttgctagaaacttatttagggcttcattaacagtcgctgtcgtccgatcttttaaccggtatgcccaaaggaaccgtgattttcgatcgattaaagttaataaaactgccttactatgcccacgaggaccaacgactgtatctagttcaaaatcgccgatgcgattacgttgattaatcatcatgggacgctgttcaattgatcgccccaaggattgattatatttggatcgttggtcaacgttacgccgttggcgtacgccatgttcaggtagatcattcaaggagaaaccaattctcccctgatttagccaattataaatagatttagtagctagtttaaattcgtgagcaatcattcctggtgaccagcttagacgtaaatggttgagaattttttgctttaactcatcgctcagcttagttttccgaccacatcgtgatcgcttgtattcggcatctgtttgtgctaattcagcctgataaggttgacatcgagataattcataagaaattgttgacggtgatcggttcagccgaacgcccatttggatattggacagccctagttcacaaaaggtttcgattttaattcgttcggaataggttatactagacaaaagatcagctcctaaaagatgggtttgtggtaaacaccattttaaaggaagctgatcttttttgtccgaacagcgttcggattaattttacaatctaccctgttaagtaataattgccgttatccgctactaattctagtaggtagtattggtaacaataattgacatctaagaattcgttatgaatctccacctattttcctccactgactactttgttcgttcttggtacgcaatctgaaccactaattgatagggatcattgccttcaaccacgccactacgcccggccatcttgttcgggccacccgtaatccaagtatgggcgactgcaagttgataatcttgggctaggtcttggattggggttaagccaaccgtcgtaatctgcgctaacggttgtttggcaatggcgttaatccccccatagagcacccaacgatctgcttcttgtttcatttcataaaacggtaaagcaacttgattcccaatcgcataaattggtcgctgcaattgttgcgcttgttcatatatatcattatcacttaagcctgcgtaattcaagctaagatagccagattcaatcagttcgttaatcaaggatcctaaacgttgggtttgttccgcgtccattgtcagttgcgcgggcaagagattttgttcttcaaataagccagtggccggttgaatttgtgagatcacttgcgttttggtggttaccccatttagtggatgtggcgcgtttggatcaccacccagcgctttttcaatatacggtgaaatatcgatgaccgcatttttgccccgataatagaaatacaggttcatcactgcaaaatagaataacaccaaaaagacgaggaggttaatcacacctcgtccaaccgcttgagctttaaagtaggtcacactcttatatagaagataaaaatcaccaattaaacaaataactgaaaaaaggcgatttttaacgcgaccattaatatttaagtaaccgaaataatggttaataatgtctaaaaaagttaacacgataaatgtcccccttattgcgcgtaaaacaaattattactgcgtagcagtggcactgctactacttgaaaccactttagcgctactacttgtgttagcagagctactgcttgccgtggtcgtgttagctgactcatcattttgtggtgttgttgtctgctcatcatcagatgattgtgagttggcatccgtatccgtccgatcctgacttgaaacagccttagaagaggaattaacggttgattcagaggtcgatgaggattccgattcagactcagattctggttttgatgtattcatgctgctggttgaacctgtggttgcactactacttgaaacaaatgacgactgctctgtcttggtgttttcaacaggtttaaccgtatttgccacaatgttggtcgcactcattgcgataattaacgaaataatggcggctggtggaataatgggtggtgtgtgatatgccattttaacgctccctttctattatgcttggcagtcttcacagaggccatagagttcgaactgatgaccttcaatttgacaatttggaatttgctgactaaaaaaatctaacggacacattttcaattcaatcactttgccacactggcggcaaataaagtgatgatggtggcgatgttcaaaatcgcattgatatttaacgtgggcctgttcaccctctgtttgttgttctactaagccaagttgttcaaaatctttaatgttgcgataaatcgtattgtgactcattcccggaaaaatggcgcgcatatgctcgtcgatttgagtcacgggaatgtagcgattttcatatcccgataaatactgtagcatctctcggcgttgcttggtaattttgtacccatttgcgcgtaatacggcaatggcagtggttatttcgctcatttaatacatccgctcctctcgattaatcgatacgccattctagcacatgctttctaggttgtcaggcgctggcgcttgttactaccaacttcaatttagttgttaccccacactatttaccattatacccttaatcccataaccgttagctaagcacaactaaatttcaccaaattttaatgaatccgaatacaaaatagttgcattatctcaggctgcgcgttatgatgtaattcagatgatttttaagaaatcgtcttcattagccttctatcagtatttatagtcatttgaagggagattttacgatggaatttactagtcaaactaataattggtatcatgtttcacttgatacgcaaactcaaaaatttatcgcaactgcaacgaacaatgaaaaaatcagcgcaagtggtattacaattgaacaagccgtacaaaaactcagttataaagtgaaacaaaccaattcggttaaccaacactcatttgcataagggttaaccatacgttaaaaggaagcctgtcgaacgcgttcgacaggcttcctttttattttcaatgatcaattttttagggttgcgattaatgttgctaaggcttgcttagttgtttcccagtcatcgttaaccaacacagttgcccgttgatttaaatgactcggtaacatcagatcccgcttaaattcagcactttgaatccgtttttgaattgcttcaggactatccttccgtttttcaaggcgcgtaatcaacgcatctgtttcagaaaccgttaagaacaagaccgatgcttcttcggggaacgtctctaaataagtctgtgcccctttggtatcaacaactaggctaatcagctgtgctttttgccacgccaaatctaacgcttcatgtgaagagccatattgatagccagaatagctcaccgattcaacgaggtgcttttgtgccaaggtgtctggtgtttcaaaataataatccaccccgtcgacttcattatgccgtctaggccgcgtggtatgggtaaccacttgtggaatttgaaaggcctcttttaaataatggctcaccgttgttttgccactacccgtggcgcccgtaatgactaatagttgttttgtcactattcattcacactcttctattcaggatttaaataaataaaaaagtttggcggcttaatttaagcagacgccaaacttttttattcttttatttaatcttataaacgacgaccaaagtcaggtttgtaatattgcattgacatcgttgttacattttggccttctgttggtgcgtgaacgtatgagccaccaccgatatagatcccaacgtgatgtgctgaaccaacgccaccccagaaaacaaggtcaccaggttgtaattctgataatgacacttttgtcccaaccgtgctttgttcttgtgatgtccgtggtaagctaatgccggccatcttagcagcgtaccaaactaaaccagaacaatcaaaaccaccaggttgtgcgccaccccatgcatacggtgtgccaatgaattgtaaggcattgccaactaatgaaccagtgtttgcaccagatggcgcaactgtcgttgtttttgcaggcgttggtgctggtgtattgtctgaacctgttttaggtgcaaccgttggtgcgattgttgctttttcagtttcttttttagcagcttcaacagcggctgctgtttgagcatctaattgactttgtaagctagcaagctgtgtcttatgtccatccacttcttgttggaaacttgcttgttcattttctgcatctgctttaagtgatgttaactgtgcttgatctttttctaactgtgcttttgtgttaactaagtttgcttttttagtcacttgttcttgttttaaagtagctaatttactttctgagttcgctacggcgtccattgcttccttgttagcttggtttaacttgccaacaactgaagcacgactgaccatatctgagaaactatcactattgacgatgaagtcaacgtaaacatttccagaaacactatccccagcacgtttttgaagcgcaattacttgttcttttaaaacagcttttctagattggacttcagcttgaactttaacgattttttgagccacttcagtaatttctttgtccgttgatgcaatgttcttttgtgcatcatcaattgcaacggtcttatttgacacttggctatcgattgaagcaaccttatcttgtgcagcacttaacttagctaataaagccgagttttcagcactaaggtttgtcattgatgcttttgtatcagcaacttcatcggcactgactgcaccaatgctaaccgccattgttgacccaattgttaagaatgctagtgcactgaacattaatcgactgacttttttcactgaatgattcccctttatcatttttaaaaatacttaacttatgtacggttttccaaccaagaacaagtgtaacattcaactattacagaaatgttacagcttagttaccgtattaagtctaaatcgggaattcacgctacttgttagcggttaacgcggcttggattttaacccattgctcatgacttagcaaaaccgcggtttcagtcccacttgcatcgacaatttcataaatgagcggtttgacattgacctctttgataatttggttcagcatctttttagcgtatagtgcctgaatttttttacgtaacattttctatactcctcgagcgtgattaattgtgttctcagcacaatcagcttagaataaaagcatcttttattatgaaatgaggtttatgcaaatgcaaatcacaagacatgatcaaccactcgatacaatcggcacaccaccagccgtcggcacacagttaccccaatttgaccttaaaaatgccgctggcgaaacggtgacttctgcgcaattgctcggtaaacggactttaattagcgtcgtgccagacattgacacccgtgtttgcagcattcaaacaaagcattttaaccaagccgtcgatcaattcgaagacgtccatttctacacaatttcaacaaacaccatcgaacaacaaaataactggtgcgctgcagaaggcgttaagaacatgcaactcctttctgatgaggcactcagtttcgggaaagcaatgcaactctacgttccaagcaacaacacgcttcaacgctcaatctttattttggaagcagatggtacaattagctacaccgaattaattatcgaacaaacagacgaaccagattatgcagctgcattaaatttcttaaaagcagcccaataacaaccccaaaacgatggttagaactgactcagtttaaccatcgtttttttttcggttattatgtaaaattattcacaacacccttgataaaacctgagcaatattgctccaccttatgaaatgacgtattatacccgtattagcatctcaaattaaactttattaaggagtccccatgaccgagctatctaacgagcttttccaaactttcaataaggtgattcaccattatcgccattattatggcatgcaattttcatccgatcatcgctcagtcagccaaattcgcattctaaaacgccttaatatcgaaaacggacaaatgcagggagccctcgccgaaagtctcgatattcggccttcatccctaaccgaatgcttgcacaaattagagtctaaacactacattaatcggcggcccgatcatcatgatcggcgaatcacccacgtcttcattacagcggcgggtcgagcggttttaaaagaagccctcgatggtcgcaatgaatttacggagactttattcggtagcctaacccccgacgaacaacaagcgctcaacgaacttctaaataaattagaagatacgttagccgacacacaacattttgactttatggctgaattcactaaacgcctcgcccaaaccaaactataatcactggaggaatcgtaatgcgcaagatacttgaatatggtttagccggtgtggtcgcctacctcataagtcgctacttcgtgtggcacattgtcttaccaacactcaacagttatccacgcttaacccgggttatggcccgttttccagcaacgacgctttttctgattctatttttaacccttacattttggttgggctgggtgcaatgggaccgccgacaactatcgccaatctatggttatctcgtctacagcgtctatctgctcttattattcattatcttattcaccaaagcaaacgtctatcatgcagttagcttgaacccgttcgatttcattcaaaaggatcacaaaacactgctcgaagccgcactgaatgtcgtttacttcatcccattaggcggtttgtaccatttgaaagcctcatttgttgaaacgaacatcatagcgctcttaacgattctaggcattgagattctccaattcgccttttatctagggactttcgcactcagtgacatcctcttaaactggtttggctgtttaattgggtttggcctttggacacttgcacaacatcattttacagtccaaacaaaaagcagctaggcattaagccaagctgcttttttaacgattgagcgtaattaactgcttataaagttgattcgttagaagtccaattgaaggattggccttatattgattcgataataagacaattcctgaacgcccattctgactcatctgtaagctagattcgaatccagattcgaccccatggcttgtaaaataatctttgtaattataaacaccacccgtatattcaccagtagtcgatgagcggagcgtttttaataacgattttttaaaaacttttccttgaacaatcgcctgttcagttcgaaagaggctactcgttgtggcatacatatttccggtccctaactcacgcatatatacgtaacttggttcactaactggcgtgccatagccgtcttgttgatagccataagcagtcgcttgttggccggtcgtttcatttggcataaaattaaacgatgttaatttaaacggtattatcaactgatttccaactaactctcgataactcttatgggtgacttgttctaaaatcccggccaaaagaaggtaattaactggcgaataattatgctgaccaatatctttaacagccaaatgatcaagcgcatattgaatccgcgcttgatctgataattctttttccggcgcagataattcagtcagtccagaacgcatatcaaccatcatcttcagcgtaatttgatccgcctctttaatctgcgggtaataccgacttaacggtgtcgctaaatcgatgttcccggcttgcacctgtttcatcaataacgcagccgttaatgacttttgaatcgatgcaatctgatacgtcgtctgtggagaattcagttgcttagtcgcaaaatttgcatagccccggccaccttgaaataacacatgattccgccgcacaattaaaatggtcccgctaaaactgttatcatatagcaactgctgtacaaattgttgttccttcgcactcaaatgattgatggttcgatcatcaatcccggcttcatgactttttgccttttgaatggctaactcaagttttgttgcctgtaattgttgctgaagttgtttcattttttgttgggtttgttgagtttggacggcatatttttgccgttcatgataaatcgtgccgccaataattagtaggatgagccctaccaacagcagtcctcttttcaatttgttgtccatccgcttagtccgctaatcgtcccttctcaatgactaccatttgagcatcgaatcgataatacagtgcttcaccattttcaacttccacaccatcaatatcgcgatctgaaatctgttcgatcaccttaatgagcgcacgcaaagtagaaccatgcgctacaatcaattgatcctggcctgcaagtaatcctggcactacttgatcttgccaataaggtaatagccgttgcgttgcctgtgcaagactctccccgcgtggccgactcatcggtggaactagtcgataacgacgggcctgcgaaaaagtcgtcaataaaggtgggaccgccgtgtaactacgccgccagcgggcaacttgatgcgcaccaaaaatagcccgcgtcttttccttatttaacccgcgcaatgccccataatggcgctcatttaatcgccaactcttcgtcattggaatggccaattggtctatttcatccagaataatgtaactcgtcaaaattgcacgcttcaataacgaagtatgcacatgactgaattgaattccggttgcttgaatttgtcggcccacatgctgtgcttgtttgcgcccagcagccgttaatggcacatcagaccaaccagtataagtatttaattgattggctaaactctcgccatgtcgtacaattactaaattcgccatgcgttaaactcacttttcctgtcgtttaaaataatccctttcagtataccacgaaccgtttcccgtgataaataacgcggcgtttccctaatttaaaagatcgtttaaatagttaaggaactgtacagttttgttgtcatctaccaattaattgtagtacaatgaatctattgaattctaaggatgtgcgatatgtcagctaaagcaaaagaattttggaaatccactatacaaatcattttattagcggccgtgatggtcggcattgcgcaattactgcttaaattcgtcattgccaatgaacaaattttcgggccatcaatgcaacccaactttacacagtatgatcgggtcattgcactacgccatacgaaactgaaacgcggcgacgtcgttatcgtcaaggcccctgattcaccaggtgaattctacattaaacgaattgtcggcatgcccggtgaaactgttcgcttcaacaaggatcaactctatattaataataaaaaagtcagtgagccttatttaaatgattataaaaaagatccaacaaccttcctagccgggtcaaactacttcacactcaacccaaagactaataagccaaactttgatttaaaggacgtgcttggtcgttccacagtccctgcccaccactacttcgtcatgggtgataaccggactgtttcaaaggatagccggtatgaagaagtaggctttgtcagtgatgattctaaaaccttcaacgggattcaaggcgttgtcaaactccgctactggccagtaacgaaatttaaagtttactaatcacgaaaaaaggtccaccacgattgtggcggaccttttttgaccgtttttttaaagatagacactaacaccgagtaaaataattgctaatagaccaataatcgccattaatggccaaacgaattttaaccacttatcaaacgttacatggaccattgccagcgaggccaagaccaaaccagttggtgtgataaacgacataatgccttgtccccagttataagcactaataataacgtcacgattaacaccgactacatcagccaacggtgccatgacgggcattgatagcaccgctagaccggaactcgacggaatgaagaatcctagtagaatgaaaacgaagaacatcaccgttgagaagataacaccactcatatgggaaacgccactacttaaccagtacaatagcgtatcactaatttgtgcctgttccataataatcgtcacgccgcgtgctaaagcaatcacaagggctacacctaacaggtcggaagcccctgcaacgaattcactaacaaaatctttttccgataatccggaaataaacgccaaaataaacgtaatcgctaagaataacgaggaaatttcattaaatagccaaccccattccttcacgccgaagaccatgatgacaaaaccggccgcaaaaataattaacatcaatttcttccggaaatcaaaccgtggtacttcattgacatcactatttcccaggaaatgtttttccaattctgctttttgattataaatgagcgattggcttggatcctgttttactttttcagcataccgaatcgtgtagaaaatacagattaatgtgcctagaatcagcattacaagccttagtcccataccatctgtaaagctaatgccagccgtattagaagcaatcacgacggaaaatgggttcaccgttgaagccattgtcccgattgaactgcctagataaatcgccgcaattgcgactagcgcatcgtagccagctgccataaagattggcactagaattggatagaaagcaattgtttcttcagccaagccaaaggtggtcccgcctagggcaatcaagctcgttacaatcacgattaaccaggcttctttacttttcaaacgttttgatagcgccgccattccggccgcaaatgcaccggtcttattcacaacgcccacaatcccacctagaattaagacaaatgtgataatatcgattgtttcagataacccttgaatgggcgcattcagaaattgtttaatcgcgccaaataagtttggtttatgctgattgagtttttgatatgtatttggaatcgcaactggtttatacaccgacccatccttaaacttcgctaaatccgtattaacgtggtatttcttcagtgttgcttgtgtcccaggtgctgtcgattcatgcccattgggtgcgaccacagtgaagttttcctgggtcgtgttatattgtaaactcgcatattttccggctggcataaagtacgtcaagatcatcactgccagtaaaacaagtagaattactgtgtaggcgctcggaaaagtaaagcgttttttcttatcagtcattcaataacctccataacgccctccatcgctgaagagccattttataaactcaattatatcacaaaggacgcttgcgctttttccataacacccttgcacagactactttcctgtgctaagattggcaccaagcaaaataagggacgacagagagcgtcctttttggaggaaaactgaatatgaaaactattacggcacacagccaacatcgattaacaagctaccagactaaggtggtcgcctcaacgacggccggcttcggtctcgaaaacatggacgttatgttcttgtctttcaccctatcgtccatcattgcagatttgcatctcagtgggacacaggcgggattaatcgcaacgattaccaatatcggaatgttgttaggtggcgttttttttggcgttttagccgaccgcgttggacggattaaaatattcacttacaccatttttatctttgcttttgcgacagcggctatgtcatttgcccacacccttcccatgatttatctctgtcgcttcttagctgggatcggtgctggtggcgaatatgggattggcatgacggtcttagccgaatctttccctaagaaacagctcggacgtgtttcatccttcgtgggtgtcgcaggtcaacttggcgctattgccgcggcacttctagcagcgtgggtcttaccacaatttggttggcatgcactatttctattcggcctattacctgttatcattactttttttatccgccatcatctagtcgaaagtacaacgttcacttctgaatcagatcaaccaaaaggtcagattagcgctctttttaaaacacgcgaactagcttaccaaacagttgcgctgatgataatggcaatcgtccaaatcgctggttacttcggtttaatgaactggttaccaaccatcatgcaacaacaaatgcacctcagtgtggctggttcatcaacttggatgttagcgacgattgccgggatgtcagcaggcatgttgactttcgattggattctagaccgaattggtccacggtttgcttttgtcttattcctgattgcttcagcagcaggcgtttacatcttaaccttccccaatagcatgggtgctttattgttcgtcggtacaattgtcggctacttctcaaatggtatgtttgcaggctatggcgcgattgtcagtcgcctctacccatccgaagtccgtgcaaccgccaataacgtgattatgaacgttggccgctgtatcggtggattttcgagcgtgattatcggttggttacttgatcattattcggtgatgaccgtgatgctcttcatttcaacactctatatcatcagcttgattatcatgctcaccatcaataatttaaaagctgatcgctactttaatcatcaataacacacaaaagggtcgagacaattgtctcgaccctttttaaatttataaactaccgccgcgtacctcggctacgttagccacaatcgtaaatgccaaaggatcaacttcatgaattcgattaataatgtgttgataggcttgattttcaacaacgagcatcaacatctgcttattgtcattagaatagcccccagtaacatcaaaaatcgtcacgcccacatcagattcttcgattaaatgggctttaatttcaggtaattggtcgttactcatgacatagaggacctttttccggttcaacccggtctcaatatagttcatcgtaatcaacgtcagaattgatgaacaagttgctagcatgaacgtctcaaaaccagagacgaacacattcgcaaagcagactagtaaatcaactaccagcaaactcaatgccggtttgatattgaaatattttttgaaaattaacggtggcactgttgagccaccactcgaggcatcaattcgatataacaaggcaattccggcagcgtaaacaacactcccaataataattgctaatagtttgtcttccaccaccatcatttggggcgttaaagctaaacaaactggtagcataaaactaccaaagagaattcttaacgtggttttcttatcaagtaagaagtaagcaagtatcagcatgccgatgttaatcacaaacaccactgttgatatcttccaccccatcaattcttctaataagatccccacaccggttgccccaccggctgctacttcatggggggcaaagaagagttgaatcccaatcgcaataatttcgagagcaatcaagatcaaccccatctggataatcgtctgtttcaaattggataagcgcatcgcgtccctcatttctttattgattattactataagtatatatgaatattaatgaagatgcgagtctaaccacttcatgcttcccgtagtgcctgtgcgagtgccactaatttacgagcggtgttggcattccgaattgtcagccactggtataggtcccctttagcaacagtcgaccaccgcgtccgaccgaatgttttcacgggtgcactccagaaaataaacggaccattcacggcaactttttcatacgctggcttaattgcccctacatgtacactcaattccgcccccgttttaggcgcaatcgccacgattaaattatgtttcacatctggcatattgccccaccaagttggtgcgtccgcaacagcttgaatcaactggtcagctgtgaccacggcgatattcacagaaaagccaaaggtctccaccataatctgatcacaagttgccgctaaggttgttaagcctgtttctggggcttcaaataacacgttgccactattgatgtatgtttgcacattggtgaacccagccgcttcatacgcagttttaagcacgctcattttaactggccgtttaccacccacattaattccccgtaataacgcaatgtattgcatctgaatccctcacttttttattcatcataacttaattagcttttgttgaccagttcgctttatcactgccatatttattattttgtggggaataataatgaaaaaagttttgcaaatagcataaatacgccatttagcttataatagtatagttataaattttcaaaaaaggatggcgcacaatgaacaatcgaactcaaccgcaaaacatcgccaaaggcatgttttgggcgactatggcgtccgcactctggggcgtttcaggtactattttggaattcatctcgcaaggacaaaagatccctgcaacttggttcctatccgttagaacgcttggcgctggtttaattttattacttatcggggcaattaagttcaaacaagatatcttctccatttttaaatcaaaacgattaacggcttggctaatcgcttacgcccttttcggtatcatgggtaatcaatatactttcttcatgagtatccaaacggggaatgcagcagcggcgactattttacaatatctaagtcctctgtttatcgttattggaaccctcgctttcttacgtaagtggccaaatcgaattgatattatctcattcggaattgctttaattggcgttttcctttctattacgaaaggcaatatccatactttaacaattccttttaattcattaatctggggaatcttatccggtgtaacagctgctttctacgttgtgctaccaagaccaatcgttaatgaaaaatcaccaattctcgttttaggttggggcatgttcatcagtggtttactcttcaatatccaccgaccattctggcaagcaccgccgcgtttaaatgcttccggtattatcgcaattttagccgttattttgattggaactgtattcgcatatctttgcttgttacacagtttaaactttgcaccatcaaccgtaatcagtatcgttgatgccgtacaacctgtaattacatttattctaagtatcatcttcttccatgcccgctttagttgggtagaaatgagtggtgcaattctagttatcctagcaatctacatcttgcaacgttatcaggaaacagaaaatgacgccttagcatagcaaaaagccatttaaccatcccataagggactgttaaacggctttttaattacgatgcgctatattatattttacttagcttaatcctactcacagctagtagggttctttataggccacgtaaacatcctgagtaacactaagtatctcattagctaatagctgcaggttaatcactactctctcttggaaaaaactgatggtaacaaaaaaggttaaacctttcggcccaacctttttatatttgcgcggcaacgtcctatcctcgcaggtagtttcccaccaactactatcggcgctaagaagcttaacttctgtgttcgacatgggaacaggtgtatccttcttgctatcgccaccacactattttgtgcttgcgcactgagaagaacttcgttctctcaaaactgcataataagtaatatttcatttcaaaagcctaacattgcacctttggttaagtcctcgaccgattagtactagtccgctccatacatcgctgtacttccactcctagcctatctacctgatcatctttcaggggtcttacttccataaaggaatgggaaatctcatctcgaggggggcttcacacttagatgctttcagcgtttatcccgtccatacatagctacccagcgatgcgcctggcggcacaactggtacaccagaggtatgtccatcccggtcctctcgtactaaggacagctcctctcaaatttcctgcgcccgcgacggatagggaccgaactgtctcacgacgttctgaacccagctcgcgtaccgctttaatgggcgaacagcccaacccttgggaccgactacagccccaggatgcgatgagccgacatcgaggtgccaaacctccccgtcgatgtggactcttgggggagataagcctgttatccccagggtagcttttatccgttgagcgatggcccttccatacggaaccaccggatcactaagtccgactttcgtccctgctcgatttgtcaatctcacagtcaagctctcttatacctttacactctacgaatgatttccaaccattctgagagaacctttgagcgcctccgttacactttaggaggcgaccgccccagtcaaactgcccacctgacactgtctcccgccacgctaagtggcgcgggttagagtggtcatacagttagggtagtatcccaccaacgcctccatcgaaactagcgttccgatttctacggctcctacctatcctgtacaaactgtacaaacactcaatatcaagctacagtaaagctccatggggtctttccgtcctgtcgcgggtaacccgcatcttcacgggtattataatttcaccgagtctctcgttgagacagtgcccaaatcattacgcctttcgtgcgggtcggaacttacccgacaaggaatttcgctaccttaggaccgttatagttacggccgccgtttactggggcttcaattctgggcttcgcttacgctaactcatcctcttaaccttccagcaccgggcaggcgtcagcccctatacgtcatctttcgattttgcagagacctgtgtttttgataaacagttgtttgggcctattcactgcggctgacctgacggtcagcaccccttctcccgaagttacggggtcattttgccgagttccttaacgagagttcactcgctcaccttaggatattctcctcgaccacctgtgtcggtttacggtacgggtagtttatttctcactagaagcttttcttggcagtgtaacatcaggaacttcgctacttaatttcgctccccatcacaacttgtccttaaagaatcaagcatttcactcaactcaagacttgttgcttagacacacatttccagtcgtgtgcattccttagcttcctgcgtccctccatcgttcaaacaaaataaactagtacaggaatctcaacctgttggccatcgactacgcctttcggcctcgccttaggtcccgactaaccctgggaggacgagccttccccaggaaaccttagtcatacggtggatcagattctcactgatctttcgctactcatgccggcattctcacttctaagcgctccactagtccttacgatctagcttcatcgcccttagaacgctctcctaccgcggacacttacgtgtccacccacagtttcggtattatgtttagccccggtacattttcggcgcagcggcactcgactagtgagctattacgcactctttaaatggtggctgcttctgagccaacatcctagttgtctgtgcaccgccacatccttttccacttaacataaattttgggaccttaactggtgatctgggctgtttccctttcgactacggatcttatcactcgcagtctgactcccggaactaaatcaatggtattcggagtttatctgaattcagtaacccatgacgggcccctagtccaaacagtgctctacctccatgatccaatattccgaggctagccctaaagctatttcggagagaaccagctatctccaagttcgattggaatttcaccgctacccacacctcatccccgccattttcaactgacgtgggttcggtcctccagtgtgttttaccacaccttcaacctggacatgggtaggtcacttggtttcgggtctacatctatatactcactcgcccatttcagactcgctttcgctacggctccagcttttcactttaacctcgcatataaacgtaactcgccggttcattctacaaaaggcacgccatcactcattaacgagctttgactaattgtaggcacacggtttcaggatctatttcactccccttccggggtgcttttcacctttccctcacggtactggttcactatcggtcactagggagtatttagccttgggagatggtcctcccggattccgacggaatttcacgtgttccgccgtactcaggatccagaacggaggttaagttgtttaatctacgtggttatcacactctttgactcagcttcccagctgattcgattacaacttaacttggtaactccaatgttctgtcctacaaccccaagaagcaagcttcttggtttgggctcttccccgttcgctcgccgctacttagggaatcgatttttctttctcttcctgcaggtacttagatgtttcagttccccgcgtctaccttcattaagctatgtattcacttaatgataatacccgactaaaggtattgggttcccccattcggaaatctccggatcaaagcttacttacagctccccgaagcatatcggtgttagtaccgtccttcatcggctcctagtgccaaggcatccaccgtgcgccctttataacttaacctaactttacctacggtaaagggttattatttgagtttagcgatatgaactaattcatatttctattaaaaaactctttaaaacgcaatgttttctcggcttttaaaactaatatattacttattatccagttttcaaagaacaaagtttgagagtagacctctcaaaactaaacaaagtttcgacttcgcaaatgtacaaggttttccgtattattccttagaaaggaggtgatccagccgcaggttctcctacggctaccttgttacgacttcaccctaatcatctgtcccaccttagacggctggctcccgaaggttacctcaccggctttgggtgttacaaactctcatggtgtgacgggcggtgtgtacaaggcccgggaacgtattcaccgcggcatgctgatccgcgattactagcgattccggcttcatgtaggcgagttgcagcctacaatccgaactgagaatggttttaagagattagctaaacctcgcggtctcgcgactcgttgtaccatccattgtagcacgtgtgtagcccaggtcataaggggcatgatgatttgacgtcgtccccaccttcctccggtttgtcaccggcagtctcactagagtgcccaactaaatgctggcaactagtaataagggttgcgctcgttgcgggacttaacccaacatctcacgacacgagctgacgacaaccatgcaccacctgtcactttgtccccgaagggaaagctctatctctagagtggtcaaaggatgtcaagacctggtaaggttcttcgcgttgcttcgaattaaaccacatgctccaccgcttgtgcgggcccccgtcaattcctttgagtttcaaccttgcggtcgtactccccaggcggagtgcttaatgcgttagctgcggcactgaagggcggaaaccctccaacacctagcactcatcgtttacggcatggactaccagggtatctaatcctgtttgctacccatgctttcgagcctcagcgtcagttacagaccagacagccgccttcgccactggtgttcttccatatatctacgcatttcaccgctacacatggagttccactgtcctcttctgcactcaagtttcccagtttccgatgcacttcttcggttgagccgaaggctttcacatcagacttaagaaaccgcctgcgctcgctttacgcccaataaatccggacaacgcttgccacctacgtattaccgcggctgctggcacgtagttagccgtggctttctggttggataccgtcactacctgatcagttactatcaaatacgttcttctccaacaacagagttttacgatccgaaaaccttcttcactcacgcggcgttgctccatcagactttcgtccattgtggaagattccctactgctgcctcccgtaggagtctgggccgtgtctcagtcccagtgtggccgattaccctctcaggtcggctatgcatcacggtcttggtgagcctttacctcaccaactaactaatgcaccgcgggtccatcctaaagtgatagccgaaaccatctttcaaccttgcaccatgcggtgctaggttttatgcggtattagcatctgtttccaaatgttatcccccactttagggcaggttacccacgtgttactcacccgtccgccactcactcaaatgttatcaatcagaagcaagcttcttcaatctaacgagagtgcgttcgacttgcatgtattaggcacgccgccagcgttcgtcctgagccaggatcaaactctcgattaaaagtttgtagctcttgttttgttacttaatttatttgctagcgaaattgactttgcaaatatgttttgtgccccgaagggcgaccctacacatttggtttgtcgaaactttgttcagttttcaaagatctactgtgttgaaacagctttttaagtatatcacacaacttatcgtctgtcaacaactatttttaattaattattacttagaagttataactccttaagcaacatataatatgttatcatgttttcaattaaataacaagtgtttttcaaaactttttatttaattgacgatactgcttatcactaatcagctcgcttttgacaactttattagtataccaacttgcaacccgtgatgcaaggattttctgtaaataaataataattatcttataacaataaaaaaaggcccttagctatactaggggccttcgtttttctactattaaacgtagaggtttttaacttgtttttgtaattccggatgtgctaagaactcatcatagttcgtttcagcacgttcgacaacaccgttcgctgatacttcaatgatatgatctgcaattgtttgaataaactgatgatcatgcgatgtaaagactaaagcacccttgaaatcgatcaaagcatcattcaatgaagtaattgattccaagtccaaatggttggttggatcatctaatagtaaagtattcgatttttgcaacataatcttcgatagaatacaacgcactttttcgccaccagaaaggacattgatttcttttgtgacttcatctccagagaaaagcatcttgcctaagaaaccacgtaagaaagtattgtcatcttcacccttagcggcaaattgacgtaaccagtctaagatgatgagttgatcatcattgaaggctgagttcgtatctcttggtaagtatgattgttgacttgtcacaccccaggtaactgtcccagtatctggctgcacttcacctgctaagatttgcattaagacagctgtcgcaacgtcatttcgtgaaacgattgctgctttttcgtctggcttaactgaaaagctgatgttatctaacactttaacaccgtcgattgtttttgaaacattctcaacccgtaaaagatcattccccaattcacgttcgaaatcgaacttaatgaatgggtattgacgtgaagagggttggatatcttctaatgtaatcttttctaattgtttcttacgagaagtggcttgttttgattttgaagcattggcactaaaacgcgcgataaaatcttgtaattctttgatttgttcttcttttttagcgttaacgtttgattgtaacttagcggctaacttacttgattctaaccagaagtcgtagttcccaacgaatgtcttgatgcgaccgaagtccacatcacacatcattgtacagacttggtttaagaagtaacggtcatgggaaacaacaatcacgatgttcgggaagtctgctaagaaatcttctaaccattcaactgaggcactgtccaacccattcgttggttcatctaataataggatatcaggtttgccaaagagcgcttgaccaagtaaaaccttaatcttttgcccttccatcaattcactcatcttcacatggtgtaaagattcatcaatccctaaggcttgaagtaattgagcagcttctgattcagcatcccaaccattcatttcagcgaattcagcttctaaatcagcagctttcatcccatcttcttcagtgaaatcagctttagcatatagggcatccttagcttgcatcacttcatacaacttcttatgaccttgaatcacagtctctaacacttcaaattcttcaaaagcgtagtgatcttggttcaaactcgacatccgttcattagggcccattgagatatggcctgatgatggttgtaatttaccttctaataattttagaaaagttgacttacctgcaccattggcaccgatcacgccataacaattcccaggtgtaaacttcaaattaacgtcttcatataacttacgcccagaaagcgttaagctcatttcactaacagttatcacttgattccctcacttttctttcatgactctaaaaagccaaccgtttcatgtgaaacggctggctttctaccattgacaatatatgcttaactctaacatatctaatgactagttatcaaccaggctatttgaccttagcaatcttaccttgttgaatatagacacttagaatcccgatatcggctgggttgaccccaccaatccgactggcttgcgcaagtgtttcgggttgaattttttgtaatttttgacgaccttctgttgcaaggccttcaattgcatcgtaatcgatattggctggaatctttttagcttccattcgttttaacttcgcaattttagctttttccttatcgatgtaacccgcgtatttgatttgaatttcaacttgttccacaacgcggttatcaatgccttcgactgctggaataaattggattaaatcagcatactttacttctggccgttttaagaagtcgctggctaaaacaccatctttaagtggtgcctcacccttagccgctaaaaaggcttggatttctggggttggtttcaagcgaatggttgctaaacgtgctaattcagcttcaacggctgcttttttcacttcatagctgtcaaagcgatcatcattgattaagcctaatgcatgacccttttctgttaagcgtaaatccgcattatcgtgacgaagcatcaaacggtattccgcacgtgaggttaatagccgataaggttccttcgtcccctttgtgaccaagtcatcgattaagaccccgatgtaagcttcactgcggtccaagatgaatgggtcgcggcccgtttgcttcagagcagcgttgatgccggccatcaagccttgaccagccgcttcttcatatcctgaagtgccgttcatttgaccggctgtataaagattttcaaccactttggtttcaagggttggttttagttgccatggttcaacgacatcatattcaatcgcataaccaggacgcatcatttgggcattttctaagccttcaatcgaatgaatcattttgtgttggatttcttctggcattgaggttgagaaatcaccgacgtaatattcttctgtttcgcggccttctggttccaagaaaatttggtgccgaggcttatccgcgaagcggacgattttatcttcaattgaagggcaataacgtggacccaccccttcaattacgccggtaaacattggggcgcggtcgagattgtcgcgaatcacttgatgcgtcgtatcattcgtgtatgtcatccaacaagaaagttggtctttcaaataagcactatcaggtgtttcgaaactaaagtggtttggttccttatcccctggttgttcttccgtctttgaaaagtcgatcgtggtgccgtccacgcgtggtggggtccccgttttaaaacgcgtgaggacaaatccgttgtcttccaaactttcagaaagtttaatagaaggaattgaattattcggaccagatgaataggttaattcgccgataataatcttaccccgagaagctgtcccagccgttaagatcacactatcagcgctgtaacgggcaccagtgttagtgacaatccctttgcagacaccgtcttcaacgatcaatgattcagcaatcccttgacgaagtgttaagtgctccgtcgtttcgatagtccgtttcattgtccggtgataagcgtgcttgtcagcttgggcgcgtaacgcgcggacagctggccctttacctgtattcaacatccgcatttgaatgtatgttttatcaatattgcggcccatttgaccacccaaggcgtcaatttcacggacgacaatccctttagcaggaccacccaatgatgggttacatggcataaaagccaccatgtctaagttaatcgttaatagtaatgtttcgcggcccattcgtgcagcagctaaagccgcttcagaacctgcatggccggcaccaacaacaatcacgtcgtagtgcgctgcgtcatattctcgcatattttgttctcctttaatatggttcaagacctatttacctaaacagaattggctaaagagttccgtaatcaattcatctggtgctgaatccccggtaatctcaccgagcttatcccaacagttggtcatatcaatttgcacaaggtcaactggcatcccagctgcaattccactgatgacttcatctaatgattgttgtgcttggtttaatagaccaatttggcgggcattagtaatcatgaccgtactttgactattttcaatcccaccgaagaagagtttggcgatttgggcttccaaatcggtcaccccttcgcttgttaaaatagaagtttgaattacttcatccgcattcaccaatgtttggagttcatttaagtctaacaagttcggtaaatcggttttatttaaaataatgatccgtttcttatcagtggtggccgtgattaactcgcgatcttcaaccgttagtggttcactttgatttaaaactaataaaatcaggtcagccttggtaattgctgcgcgacttctttcgaccccaatcttttctaccttatcttcggtatcatgaattcctgccgtatcaacaagcttcagcggtaccccacggacgttgacatattcttccaaaacatcacgcgtcgtcccggcaacatccgtcacaatcgccttatcttcatgtaataggtgattcaacaaacttgatttaccaacattgggccgtccgacaatggccgttgctaggccttcacgtaagacttttccttgttgtgccgtttgaagtagttcaccaatccgcgctttcacaagttcggctttttcaagtagaatccgcgtcgtcatttcatcggtatcatattcgggatagtcaatgttgacttcaacttgcgccaatacttctaagatttcttggcgtaaattcttaatcaggtgcgttaaactcccatctaattgatcaacagcaacttgcatcgcccgatcagtcttagcccgaatcagatccatcacagattcagcttgggttaaatcaatccgcccatttaaaaaggctcgtttcgtgaattcacccggttcggccattcgtgcaccatagctcattaataattgtaagatgcggttcgttgcgacaattccgccatgacaattaatctcaatcacatcttcgcgggtaaacgttttgggtgcgcgcatgacagacaccatgacttcatcgactactgcgtcggttttaggatcgataatgtgcccataattaatggtatggctcgccacttgatcaagatctttgccgcgataaacgcgtttaataatggctaaactctcatcccctgaaagacgcacaattgaaattgccccctcaccaggtggtgttgaaatcgccgtaatcgtatcaaattctgtgactgtcgttggcattttaaatgcttcctttccgaaatagctgcataaaaaaagcgcttagcgtccacccctcccgtcattgcgtaaggggtggacaaagcactttcactactttatcgatatttaattagtttcattatacacgatttttttagagcgtcaattcacaacacctaaaatgtgcgcgctaattccaccacaattgaccggcgatcgccttggccttctgaatgagtttgaacatggtgattagttgctaaatgcccatgcacaattttgcgttcaaaagccggcattggttctaaaaagactggtttgccggtcgcaacgacttcacgggctgctttatcggcaaggtggctgacaatcgctgctcttcgctgccgataatcaccaacttctaggataatggtttgcttgcccttcatatgatgatcaaagtaagtctgcgctaaatattggagcgcattaattgtcttaccatgcttaccaatcaacaagccttctttatcggtcttcaaatgataagtcgtactccgatggtcgtgagttacatgaatgctgaccggtgtgccaatttgagccgtgatggcttccaaataggcgcttaactcagcttccgtttccacaccacttttccgcttttgcggcgtactagttaaattgtctgttggcgttggttcaactagctcttgaactggggctggggcgctttgtttaacttggcttggttgttcatttggcgttagccggacaactgctaagcggcgaccaaaaccgagaaacccttttttgccggcttccaatacatcaacggacacttcctcacgcgttagatgcatagcttgcaacccttcatttaccgctgcttgaatatcgctaccttcatatgttggcatttcaaaacctccgatcaatttggtcactccaactagtgtgagcgcccgattctcgtttattataccatgatataccactttaaaaatagcatgtcattatctgagatagtccgccgtcaaagctaggaattgttgtacatctttagcgatgctatccgcggcagcttgccagaaatccggttgggttaaatcaaccccaagatgtttttgcgctaatgcttcagtcgacatattggccgtatcacgtaatagtgcgatatagtccgcttcaaaatcaggcattgtctgtgccttggcataaatccccatcgaaaaaagatagccaaacgtataagggaagttataaaacggcacgtcatcgaagaagaaatgctgtttgtccgcccagaatagcggatcataatcagtcaacgcatccgcataggcttctttttgagcggctagcatgagtgcttttaaatcagctgttgtttgcaggccattttggcgcgctgtataaaaatgtcgctcgaataaaaaccgtgcgtgaatattcataaacatatcaattgcgttagtaattttctgatccaataaattaatcttcgctgctgggctttgcgctgctttaacagtcgcatcactgacgattagttcagcaaaagtggaagctgtttccgcgacgttcatcgcatagtcttgtcgccaacttggtaaatcattaatcatcattgtatggaacccatgccctaattcatgtgccaaagttgcaacaccattgggggtgccatcaaatgtcataaaaatccgaaaatcatccgtttcaggtaaatcagtcatataaccacctggttgtttgcctggccgatcttcagcttcaatccaacgcttttcaaacgcggtttgtgccaccgaagccatcttgggactgaacgctttaaagttctgcatgataaaaaccgctgcttcatcataagaataacgctgcggttgaaaatcacctacaaccactggtgcccaggtatcataccaagcaagctgttctttgcccattaacgctgccttccgatttagaaaatcgacaagcggcgctttattttgactaacgatcgaccacatcgcttctaacgttgcgggttgcatgcgactcgttaccaatggctttttcaaaaagtccgttgtgccatgtgcttgataatccgttaggcggaagccagccaaatgatttaacgtatccgttaataatggtgaataccgatcccaagtctggtaccaattttgaaagacgcgttggcgtaccttgggatctgggtcagattcaaatttattctgcgcttgtcccgccgataaagtcgtctcaccatcggggacttgaatttcagcaaccaatgagtcgtaatgatcactccatccagttaaaccatctaacgcgaactggttaattagtttttccgtcgcttcatccaaaagttcagcaccattcgtccgtttttcggttagattaaactgaatcgcttgtaaggcaggtgtcgatacaacggttttaaaatctgcgtctgacattgcgaccaatttttttgtgagtgcgacatcaatctgattcgcatcattttcaagcgcattaatccgccccatcatcggtgcaacttgcggattacgttcatccgttgattgaatcatattcacgaaactccccgtttgcttgagacccgcttcaatcgcttgtaactgttcagtgatttgcgttagcgttgcaaatgttggctgatctgtcgcaaacgtccagttctggaccgcttctaataagggcgtcatttgtgcagtcaaatccgccaatcgttgcgtcaacgctggtgaatcaatccccccggcaaaaatcggttctaaatcccattgttctgaataggtcatctctttgtcctccacttttaaacgattgcacttattatagcgaaatttcgcgcaaagcgcgattaattcaaccagatccactagacattttgataatatctgttaaattaggaatgtaagcagatacatatctgctagaaaggcgatgtttatgatgacgattgaacaagtacccgctaatacaatcgcagatttaaaagcactgttaaaaacgacccaagtgcccgataaaattatggcaatgggacccgaactgatccaatacttaacccatattaaggcgagttaattatcagacaccgaccatcttgggttcgatttagggagtgccggcattttaacgttaatcgaacaagtcaatacagcctttttcgatcacttccatatgttcgacgatgctgcaccgattgaaccaaagttaacgcgtaaaattctagtgctttatcatctaaaaccgattgatgatcagcacttcctccttcatttgaaacaattagactattaaacagcaaaaaatcgtaaccaaatcggttacgatttttttattcggcaaattctataattaatccgaacagaaattaaaaagcccaaagcaatcacttacaatggtagtagctaattccaaccaatatagggagtgattactttgggtacatctactttatcacgttttcaacgtggcgcactagcacaactggtcaatgaggggaataaatcttaccaagtaatggctgacgccttaggcgtcgccaaagctacgattagctatgagttggaccgagttaaaccttatgatccagaattagctcagcaagatgcagatcgcaaaaggcggaattgcggtcatcgttcgatgctgacggcagcattagcgactttaattaccaatcacttacgattaacctggtcaccagaaaccattgcggccgcttataacttgagcactgcgtcaatttataattggcttaatcgtggctggctccccttcaaattgactgatctacccaatcggaatgtccgccagcaccgagtgagcgaaaatcgtgggaaatttacaagtgggacttccatcgaacaacggccaacaactgttaatcaacggttagcttttggtcattgggaagtagatacggtgctttctagtcgaagtgagtcacgatcatgtctggttacattcgtagaacgtaagacccgacttctatgggccataaaagcccctaatagaacggctaaggctctaaacaccgcctttggtaagtttatgggggccttcggtccccaagtaaaatccattactgttgatcatggtaaagagtttgccaattatcaggccttagaacaggattatcagatcaaagtttatttttgccatccatattcaccatgggagcgaggttccaatgaatattttaatagacggttacgctggttcttcccgaaaaagaccaattttagccaagtaacgactgatgagatcctagcagcacttgaactaattaatcaacgaccattaaaaatacatcatcaacagactgccattgaaagattccgggcttgttcggattaaacttgtaatttgcctgtccaaaaaattttgagacagtggctaacttgattctaaaatgcgcggctgagaaaaacaacgattaaccgccataaaaacgggttacttattggtgccgtttgtgtcgtctgcgctatcgcaattcctcttgtacttgctgcctattacctattctaaaaaagaccaatcataatgaaaattcattatgattggtcttttaattttggaaattaacgtttcttagttgctttcttacgtgctttagcaagtgctttttcacgatcacgcttttctttttccttggcttcgcgttcgcggcgaatcttaaatggattttgaatcaccattgtttgacccactgaaaaggcgttcgttaccacccagtaaattgaaacagcagacgcgatgttcatggccatcacaaaaatcatgattggcatcacccacaacattgcggatgacgcagcattcttcgtgggttgcgacatcattgttagatacgatgttgcaaatgtaaagatcgcagccaagatagccataataaagtaaggatcagctttcccaagttgcatccataagaacgtcccactctttaaagcagctgttcgatagattgcttggtacaaggcaatcaacactggcatttgaaccactaatggtaaacagcccacaactggattgacgcccgcttcagcatatagcttttgcgtttcttcgcgtaacttctgttgtgtctcagcatctttagaagcatatttcttttgaagtgcttgaatttctggtgcaacttcttgttgtttgagcatgctcttactttgccaccaagttaatggcaagataatcacccgaatgatgatggtgaaggccacaattgcccaaccataactgccaccaaagatgtctgctaaccataaaataaagcgggagaagttataaataacataatgatcccagaagccagtactgctactatcaactggtgatgtactacaccccgctgcgattagcatgaacaagaatagactggccactaataatagccgtttgcgattttttgaactcactgtaatccctcacttattcagaagcagaatctgcttcttcctttaatagctttgctagttttaagacgtgcattaaattctgtttggtttccgccattgttagttggttagcgccgcgtcttgcgatcactaaaaagtcgacagtctgtggtaactctggcttcaactccaacaagctctggcgaatgtaacgtttaacctgattacgcatcactgcgttacccacttttttacctacggacaggcccacccgaaaatgcttttgaccaggtttttctaattgataaaccacaaaattgcggttggcaactgaatgacctgcttcaaaaaccgtttggaaatcctgttcttttttgacgcggtacgactttctcataattcactccggcatttcatttaattaattgaggataataaaaaaaccactgaagcatcagtggcctatgcagataatacttttctgcctttagcacggcgtcttgcaagtaccttgcgaccgttcttagtattcatacgtttcatgaaaccatgaacacgttctttatggcgtttctttggttggaaagttctctttgtagtcattatactggcacctcctaattgactgtgtctattgttttcatatctgagaaacaacgggtgataaataccacctacgacattcactaaaatataatagcatatttctatagaagttaaaacactttccataaaaaaacagaataaatattcttatccacaaaaaaaataattcattggctttcttgtggataactgattataccgaatcgtccgatttttgtcacgcacagattacttgctgatttatccagaaaatcacagggtgttactatgttatccacaagctattttcaagctgtgcacaaattgataaaaccttttaatagcaagcatcagatacacacacttttttgtggataagtgcgataatcgtttgttgttttctgttttccacagtccccactaaaagttatccccggtcgtgtgttcaagtggataactttttaattcattcctgtggattttgttcttgttgtggaaaacttttttttagaatgctagaatgtagatagtctttctttattgaactttttttcaataaagtggttattttacgtgaggaggacacgctacatgcctgatcttcaggaactttggaactatttgcgggaagaattccaaaatgatttaacacccgtcggttttaatgcttggattaaaaccgccaaaccgcttgcttttagagccaatgaaatactgatcgaagtgccttctcccttacacaaagagtattgggaaagtaacttggccactaaggtcgttgaaggggcctacgaattcgcagagattgaattgacccctatttttctgttacctaccgaagccgagcagcttcaagctgaaaaaccagctgaagaacgcagcctcaccaaagctgaaaccccaacctttttacgtgaaacgcatttaaatagtaaatacacgttcgacacgtttgtgactgggaaaggcaatcagatggcccacgctgcagcactcgttgtttcagaagaacccggtgttttatataatccactttttttatacggtggagttggtttaggtaaaacccatttgatgcaagctatcggtcaccagctgttactctctaaacctgacacgaacgtcaagtatgtgacgagtgaagcttttgccaacgacttcatcaattcgattcaaacgaagaatcaagaaaaattccgccaagaataccgaaacgttgatttattattggtcgatgatattcaattttttgcggataaagaagggactcaggaagagtttttccataccttcaatgatctctacaatgataaaaagcaaattgtcttaacatctgatcgtttacctaatgaaattcccaagctccaagaacgcttagtttcacggtttaaatggggcttgtccgtcgacattacgccgcctgatctggaaactcgaattgctattttacggaacaaagccgacacagaacgcctcgaaatcccagaagatactttgagctacatcgctggtcaaattgattccaacgtccgtgaacttgaaggttcactggttcgggttcaagcttatgcaaccatgcaaaatgctgaaattacaactagtcttgccgccgatgcccttaaaggcttgaaactcaatgggaagtcgagtcaactttcaattgctaagattcaatccgtagtcgctaagtactacagcctttcaatcactgatttaaaagggcgcaagcgcgttaaagaaattgtgctcccacggcaaatcgctatgtacttggcccgcgaaatgaccgacagttctcttcccaaaattggacaagaatttggcggtaaagatcatacaacagttatgcacgctcatgaacgaattagccaagctttaacgagtgatcaaaatctaaaagatgccatcttagatttgaagaataccttaaaaggctaaatataggctgtggataaacgctaaagttatcctaagagttgttctcaacttatccacaagtggaaaactagacactcttttgcttttctatgttatccacaggttccacaggccctactactattacttaaaattcttttataatatatatatctattttccttcggaggtttaacatccatgaaattctcaattaaccgcaacgtgttcatcaaaacccttaatgatgttcaacgtgccatttcagctaaaacaacgattcctattttgacggggcttaaattagtgctttcgcaagaaggcttaaccttaaccggtagtgatgctgatatttcaattgaagcaacccttgctagtaatgatgaaaagaatcaattagtcgttgaagaagcaggtgccattgttttaccagcccgcttctttagtgaaatcgttaaaaaattacctgaagatcaaatgacgattgctgttggtgacaacttccaaacaaccattcgttcaggtaaatcagaatttacaattaatggcttagatgctaatagttatccacatctacctgaaattgcgggacaaaatccgttcagtatcagtactgatgtgcttaaacaattaattcatcaaaccgtcatcgctgtttctaaccaagaaagtcgcccaatcttaacgggggttcatttggttttaaaagatggcgaaatgttagccgtcgcaacggacagtcatcgacttgcacaacgaaaattaaccgtttcagtaccaagtgatgggaactacgatgtcattattcctgggaagagtttaattgaactttcaagaacgttagcagacgaagttgaaaccgttgaaattcggattgctgaaaaccaagtgctctttaaagccggtaacttagccttttattctcggttgttagaaggaaattaccctgacacagcacgtttaattccaacttcttcaagtacacaaatcgaattcgatgcaccggtcttattagctgcgattgaacgggcatcattgttgtctcatgaaagtcggaacaatgttgtccggttgacattgaatacaacggacaacacggcaatcatctacgggaactcaccggacgttgggaatgttgaagaagcccttcaatttgaaaacctaacgggcgaagatctcgaaatttcatttaacccagattatatgaaggatgctttacgttcatttggtcaaacaaccatcgtgattaactttacggcagctttacggccatttacattggtcccaagtgaagatcaagaacactacattcaattaatcacaccagttcggacattttaataatcaaaaaacgccgcatttaaaaatggggcgtttttttttgcgctaaaattaaaataaattcgtttacagcgatttcggataaaacaagtaggataaggttaaagcacttaaaaacgctcagaaagcattttagctgtgtttatttgtttttaaggcaaaaaaagtctataattgtaaggtataacagatcggtattagcgcagtaattaatatcgttaagaatggtgggttgagtatggcacaagaaattaaacttgaagctgagtttgtgacactcgggcaactccttaaagaggccggtgtgattgaaacaggtgggcaagcaaaatggtttttaaaagaaacaacggttttagtgaacggagaacctgatgatcgtcgcggccggaagttatatccggaagacgtcgttgaggtgcccgataacggccagtttgtcattaaacaacaagaaagattgtaggcgactatgtatttaagtgaactccaacttgatcattatcggaattacgagcaagtggacgtccatttctcgccagatatcaatgtcttgattggtgaaaatgcgcagggcaaaacgaacttgctagaagccatctatgtgttggctttggctcgttcgcatcggacgaataatgatcgtgaactgatacaatgggatggcgaattcgcaaagattaccggcttggtacaacggcaaactggccacacaccattagaattggtggtcagtcaaaaaggtaaaaaagcgaaggtcaatcatttagaacaggctaagttatcccaatatatcggtcaattgaatgtcgtcttgtttgcaccggaggatttgaatatcgtgaaaggctcgccagctgtccgacgacgctttatcgatatggaattcggtcaaatgagtgcgaagtacctgtataacatttcgcaatacaagtcgattttgaaacagcggaatcagtatttgaagcaactacaacgacgtcaagctaaagatttagtgtatttaggcgtattgtccgaccagttagccgcttatggcgcggaagtcacggttgctcgccgtgaatttctgcaacagatggagaagtgggcgcagaagttgcatcaagagattaccaaagagcgggaagttttgacgtttaaataccaaagtcagattccagatgagcagttggtacttgatgccgaaggtttataccaacagtttcaaatcctatacgagtcgcaccaaacacgggaagtcgaacagggcacgacattggttggcccgcaccgcgacgacgtgttatttttggttaacggtaaggacgtgcaatcgtttggctctcaaggccaacagcgcacaaccgcgttaagtgttaaattggcggaaattgacctaatgaaggaacaaaccggtgaatatcccgtcctattactggacgatgtgttgtccgagcttgacgatttacgccaaacacacttattgaaaacgttccagaataaggtgcagacgttcttaacgacaactagtcttgaaaatgtcaaaaaagaaattattagtgcgccacgggtgtttaccgtgacaaacggcaccgtgacagtggccgatgcagcagcaaattagtcaaaaaacgatcaaacggaggtttttttcttggcagatgatcaaatgaatcaagagacagaagcacaaatggaagcaaaagaagaacgcgctaaatcttatgatgccagtcaaattcaggtgttagaaggcctagaagccgttcgtaaacgaccagggatgtacattgggacaacgagttcccaagggttgcatcatttggtttgggaaattattgataatgggattgatgaagcactcgctggttttgcaacagaaatcaacgtggttgttgaacccgataatagtattacagttacagatgatgggcgtgggattccagttgggattcaagctaagactggtaagtctgcgctcgaaaccgtctttacaatcctgcatgccggtgggaaattcggcggcggcggatacaaagtatctggtgggttgcatggtgttggggcttcggtcgttaatgccttgtcaacggaattagatgcggttgttactcaaggcggtaaacgctactacatcgatttcaagcgggggaaagtgcaaacgccaatgaagatgattggtgacgcaccagcccatgaacatggtacgaaagttcattttgtccctgatgctgatatctttactgaaacaacggtgtatgatgataaaattttaacaacgcggattcgggaattggccttcttaaacaaaggcttgaagttaacgttcaccgacaaacgggctgaaacacatgaaaaacttgaatttcactatgaaggtgggattaagagttacgttgaatatttagacgacaaaaaagagacccttttagacgaaccaatctatgttgaaggtgaacaaaacgggattaccgtggaagttgctttgcaatatacgaatgattatcggacgaacttgatgacctttgccaataacattcatacctacgaaggtgggactcatgaatctggctttaagacggcgctcacgcgggttattaatgactacgcaaccaagcaaaacatcttaaaagccaacgacacgaacctttctggggaagatgtgcgtgaaggcttaacagcggttgtctcggttaaacatccggatcctcaatttgaaggtcaaacgaagacgaaattaggcaatgccgacgcacggacggtgactgatcggatgttctctgatcatttcacgaagttcttgatggaaaacccatcgattgcccgccaaattgtcgacaaaggctcattggctgccaaagcccggttagctgctaaacgcgctcgtgaagtgacacggaagaagaacggtcttgaaatctcaaacttgccaggtaagttggccgataatagtagtaaagatcctgctatttcagaattattcatcgtcgaaggggattccgctgggggttcagcaaaatcaggccgttcacgtttaacgcaagccatcttgccaattcgggggaaaatcctgaatgttgaaaaagctagcatggaaaaaatcttggcgaatgatgaaatccggaccttatttacagcaatgggcactggttttggccaagaattcgatgtggctaaagcccgttatcataagttgatcatcatgaccgatgccgatgtcgatggtgcgcatattcggacgttgcttttaacgttgttctaccgttacatgcgaccaatcgtcgaagcgggttacgtgtatatcgcacaaccacctttgtaccgtgttaaacaagggaagatgatgcgctatattgattctgatgaagaattacaagaagtgttagggacgctccaaccaagtcctaaacctgaagtgcaacgttacaaagggttaggggaaatggatgctagccaattatgggaaacaaccatggatcctgaaaaccggcgcatgttgcgggttaacgttgaagatgccgaagaagcggatcaaatttttgaaatgttaatgggcgatcgggttgaacctcgtcggattttcattgaagaaaatgccgtttacatggatccaaagagcatcgatgcatagcgtgttcgccgcttaaacggacacattgaaagactgactgagaggggtttatagattaatggcaaacgaaattggccaagacggtcggattgaaaacgtcaatttatctaagacaatgcgtaaatcattcctggaatatgcaatgagtgtcattgttgcgcgtgccttaccagacgttcgtgatgggttaaaacctgttcaacgccgaattttatacggaatgaatgaattaggggtcactcccgaaaagccttacaagaaatctgccagaattgttggggatgttatggggaagtaccatccacatggtgattcagcgatttatgaagcaatggtgcggatggcacaagattttagttatcgttacatgttagtggatggtcatgggaatttcggctctgtcgatggtgatggtgctgccgcaatgcggtacaccgaagctcggatgagcaagatggctgtcgaaatgttacgtgatatcaataagaatacaattgattatgtaccgaattatgatgagtcagaacgcgaacccgctgttttaccagcccgtttcccgaacctactcgtcaacggggcgactgggattgccgttgggatgacaaccaatattccaccgcacaatttagccgaagtgattagcgcattacacatcttgatggataatccagatgcgacaaccgctgatttgatggatgccttacctggccctgattttccaactggtgggttagtgatgggtaaatctggtattcgccatgcgtatgaatctggtaaagggacaatcacccttcgcgctaaagtggacgttgaggtccaaaagaacggcaaagaacggattattgtcactgaaattccatacatggttaataaggccaagttggtcgaacggattgctgaattagcccgtgacaaacggcttgaagggattaccgatttaaacgatgaatctgatcgtgatgggatgcgcatcgtaatcgatgtgcgtcgggatatgagtgcttcagttgtcttgaataacctgtacaaattgacaccattacaaacctcattctcatttaatatggtggccatcgtgaatggtgcccctaaagtcttgagtttgaaatcaatcttggaacactacttagtgcaccaagaagaagtcattcgtcggcggactgaatttgatttgaagaaggccgaagcgcgggcgcacattttagctgggttacgcattgctttagaccatatcgatgcgattattcagatcattcgtggttcgaatacaggtgatgccgctaaggtcttgttgatggatcgttatgatttatcggataaacaagcgcaagccatcttggatatgcgtttagttcgattaaccggtttggaacgtgataaagtcgaaaatgaatacaataatttgatgactttaattgctgatttgaaagatattttagccaaaccagaacgcattaagaagattatctacgatgaattgcttgaactccaaagtaaattcggtgacaaacgccggacagaattattggtgggtgaagtgcttagtcttgaagacgaagacttaatcgaagaagaagacgttgtgattgcattaacgcataacggctacattaaacgattaccagccagcgaattcaaagttcaaaatcgtggtggtcgtgggattcaaggaatgggcgtccatgatgacgacttcatcgaacacttgctttcgacttcgactcatgaagtgctcttattcttcaccaatactgggaaagtttaccgtgccaaagggtatgaaattccagaatatgggcggactgctaagggaattccaatcattaacttattaggcattaattctgatgaacgcgttcagaccatggttaatgttggtaaagaagtgcaagacgaacaatcactcttctttattacccgcttagggacggtcaaacggacatccgtttctgaattcgccaatatccgtagcaatgggttgaaagcattgaccttgcgggaagaggatgaattaagtaacgtcttgatgactgatgggcaacaaaatatctttatcgggacccataatggttatgctgtgtcatttagtgagacagctgtccgttcgatggggagaaccgctgctggtgtgcgtgggattcggttacgtgaaggcgactatgtggttggctctgacttactgattccgggtcaagaaatccttgttatctctgaaaaagggtacggcaaacggacaccggttgcagattacccaatcaagggtcgtggtggtaaagggattaagactgccaacatcactgaaaagaacggcccattagctgggattgctgccgtcactggagaagaggatattctcttaatcactgatactggcgtcttgattcgtttcaaggtcgctaacgtttcacaaactggccgggccacacttggtgtgcgtttaatccgggtggatgacgaagcgaaggtcgcaacaatggcgaaagtcgaagctgaaccagatgaacctgaaacaccagaagcaacgacggcaccaatagcaccaactgatgacactactgatactggcttagcacaagtcgatgaattactcgcgcgggctgaagccgatcaatcggcatcagatgatcaagattcagaaaattaattaaattaaaaaaataaaaatcgtttctgcgtaaatacacttgtaacaactgttaccaagcgtgttagcagcaacgatttttattttagattgtattttaacggccgttatgatagaattttatcttgtgagtatctgtgatttagacacagggtctaaatcgtgaggctaatttttattagtcagttactccttgttcttacacaggtaagaacctaaagtccataaggaggtgaacagtcatggctcaatcaaaatacgaagttacttacatcatctcaacaacacttgatgaagaaagtaaaacagctcttgtcaaccgttacgacggcatcttaaaagacaacggcgctgaagtgattgattcaaaagactggtcaaaacgtcgtttagcttatgaaatcaacaatcaacacgaaggcatttaccatatcgtaaatgttttagctgataatgatgaagctttaaacgaatttgatcgtctagctaagattgatggctcagtattacgccatatgatcgttaaacgcgaagactaattttgaattgtaattattgaatagaggggagctgacagaatgattaatcgagttgtactcgttggtcggctaacacgcgatgttgacttacgttacacttctagtggtgctgctgttgggactttctcaatcgcagtgaaccgtcaattcacgaatgccaatggtgatcgtgaagcagactttatcaactgtgtcatctggcgtaaatcagcggaaaatttcgctaatttcactaagaaaggctcactagtcggagttgatggccgtctacaaacgagaaattatgaaaaccaacaaggtcaacgtgtatacgtaaccgaagtggtcgttgataacttctcattgttagaatcacggacaacaacggagcaacggcaaggggatggcgcaagccaaaactttaacaacaatcaaagcaatggtagccaacaatctggatttaccagccctcaacaatcgggtaatccatcagctgcaaataacactcaagccgatccatttgcaaataatggtcaagcaattgatatttcagatgatgatttacctttctaaaataaactgttttggaaggaggaactttcaatggctcaacaaagaagaggcggcaaccgtcgtcgtcgtaaggttgatttcatcgctgctaaccacatcgaatatatcgactacaaagacactgatttattgaaacgttttatctcagaacgcggtaagattttacctcgtcgggtatctggtacaagtgctaaaaaccaacgtcgtttgacaattgcaatcaaacgcgcacggattatgggcttattaccattcgttacagaagactaatcagtcaaccaaaagacctgctaaacactgtttagcaggtctttttttgtgcgctttaataggggaacatgggattaaattacgggttcaaagcggtaattgtagggcaattgtgctaaaataaaagtagcattttttaagttttagtaaagaaccacatagactcaatgatagatgaacaagaatcagaatgggatctagaattaaggagtttacatgaaaaataagtttaaacaattaaaattaccacagtttttagatgatactcgcctgcggaccgttgccctgattttgttgggccttacagcggttagtttggtatttgctgcgatgttagattggctaattgctctaattttattcgtgctgctaatcgggacggtcattactgtgctatacgcgatcgaaacggtcactgagaatacagccaagtatgtctcggacttgtcgtaccgcattaagcgcggcgagcaagaggctttaattaagatgccaattgggattttattgtacaacgaatcaggtgagattcaatggacgaatccttatttacagcaatatttcggtaataaagaagttttaggcaaaaagattaagtctgtcgatccagagttggcagaattagtcgcacaaaatgaagatgctaatgaaacaaaaattgttcgttggggcgataatcaattccaaatcattatccaagaaagcattggggtggtttatcttctcgatattacacgctatgcggccattgaagatcgttatgaagatgagcaagtagccatcgggcaagtgttcttagataattatgatgaaatcactcagacaatggatgatcaatctgtttctaatctgaataactatgtcaccaacgagttatcacgctgggcgaatcagtttcagatgttcttgaagcgagttgatgatgatcatttctttgttttggcgtacgccaaatcattacacgccgctgaacaagagaagtttaagattttagatgaaattcgagaagaaacatccaaacaaaacttcccactaacgttgagtgttgggtttgcttatggggaatccgatttagccgttctagcaacaacttcacagagcaatttggatcttgccctcggtcgtggtggtgaccaagtcgttgtcaaagcgagtgaaggacaagcacgtttttatggtggtaagactaatccgatggaaaaacggacgcgggttcgtgcacggatgatttcacaagccttacaagaaatcttcaaacaagttgacgaagtctttgttatgggccatattcggccagatatggatgcattgggcgcctcatttgggattcgccggattgccgagatgaacggtaagaagtgctacgtggtcgttgaccaaaacaatattcatacagatattcaacgtcttttagaggaagttaaagcctaccctgaaattgcagtggaagtgttgtcgcctgaagaagcgctcgaaaaagcaacggccaatagtttattagtgatggtcgatcattctaaaccatccataacaatggcgcctaagttgtacgagaagcttgctcagcggacgattgtcatcgatcaccatcgtcgtggggaagagttcccagaaaacccaatgttggtttatatcgagccctacgcctcttcaacgtgtgagttagtgacggaaatgtttgaatatcaaccacaaaatgtcgctaatattaacaagttcgaagccacaacgatgttggctgggattacggttgatacgcagtcattttcaatgcgaactgggacgcgaacgtttgacgcagctagttatttacgttcagttggggctgatgcttcgatggttcaacacttgttaaaagaaaatgtcgataattatattcaaaagaatcatttaattgaaaccattgaaatggttgagccaaatatggcattatgtatgggtgaggacaaccgtacctacgatccggtcatcgcagcacaagcagcggataccttgctgtcattgtcagacattgaagcctcgtttgtcattgtgaaacgcccagatggcatgattgccatttcagcgcggagtctaggtgatgtgaatgtgcaagtgattatggagaaattaggtggcggtggtcatctttccaatgcggcaacgcagatggcagatacgactgtttccgaagccaaggcgaagttattaacggttttggcagagctatttgatccggaaacggacaaggaagcaacaaacgattaattagataaggtggtcagaacaatgaaagttattttcttagaagatgtacgcggtaaaggtaaaaaaggccaagtgaaagatgtgccagatggttacgcacaaaactttttaattaaaaatgggaaagcaaaacccgcaacatcagctgctatcagtgctttaaaaggccaacaacatgctgaagctaaaaatgcagctgctgaattagcggaagcaaaggttttaaaagccaaaattgaagacgataaaacaatcgttgaaatcaaatctaaagcgggcgaagacagtcgcttatttggttcaattccaagtaagcaaattgcccaagcattggctcaacaatatcagatcaatgttgataaacggaaaattgatttaccagaaccaatcaaagcgttgggttaccggaatgttgatgtacggattcaccctgatgtaacagctacgattcgtgtgcatatcgtaaccgaataataaaatgaatgattgaaaagaccgtgattagcaccactatcacggctttttttattgctgaccaatcggtgactgttgccagtcactggtattttgagtaaactagtgagtaattgaagtcgattaaccaaaggagtaaaaatggtgaataatgaactaattgaacaagtaccgccgcagaataatgaggcggaacaggccgttttaggggccgtctttattagtggcgatgcgctcgttgaagcaatggaatacgttactgccgacgatttttatcgtaaagcccaccgtttgatcttcgagacgatggttgaattaaacgaacggggtgaaggaatcgatgcggtgactttaaagagtgccctcgatgcgcagaaccaattggaagatatcggtggtattggttatttagctgagttggctgaggctgtaccaacggcagccaacgtagtttattatgccaagattgtctctgaaaaagcaatgctgcgccgtttaatccaaaccgctcaaaatattgtggcaaagggttacgcgcaagatgaagacgtcacggatattttagataccgctgaaaaggaaatcatggatgtttccgaacggcaaaataaggccgggttcaaatcaatttcagatgtcttaacgagttcaattgaacaaattgataagttatatcaaaatgaagaagacattacgggtctatcaacgggataccgcgatttagataagattactgcgggtttgcatgaagatgaactcattattttagcggcccggcccggggtggggaaaaccgcgtttgtcttaaacattgctcagaatatcgggacgaaaaccaatgagaatattgcaatttttagtttggaaatgggtgctgaacaactcgttaaccggatgttgtgtgcagaaggaagtattgacgccaaccatctaagaaccgggcaactcgacgaacttgaatggcagaatctaatcgtagccatggggagcctttcaaaagcgaatatctatattgatgatacgcccggcgtgaaaatggcggaaattcgggcgaaatgtcggcgcttagcgaaggaaaaagggggcgttggcttaatcgtcattgattacttgcaactaattgaaggttccggccaagaaaaccggcaacaagaagtctcggcgatttcacgtcaattaaagaaattggctaaagaattacgggtaccggtcattgcgctctctcaactctctcgtggggttgaacaacgacaagataaacgcccagtcctttcagatattcgtgaatcaggatcaatcgaacaagatgctgatatcgttgctttcttatatcgtgatgattactatcgcgatgaacctggggaagatggcgatgatttcggtggtggcaatccgccagcaccagcgccacagcagtcagatgatgcggacgttggagaagttgaagtgattatcgaaaaaaaccgtgcgggtgcacgagggacagtcaaattattatttgtcaaaacgtttaataagttctcatcaatttcgtatgcggaccaatagtaatgactatttttaataaatagtgaatattatcgtaaatgaaatacttaaaaaagccatcataattaaagtaaaaactttaattatgatgatttttttgatgggcatattaactgatattcgttaattagatgacaataatgggagggagaaatagaatgataacatcgttactttagttttatgagaatattctaaagatatttaaaaatttatttatatccaaaaatagttaatataatgcgaatctatagtgaatttcaattaatattaacattgttttccgtggctatggatggcattgttgtgttaagcactgaatgggcaactttttaccaaacacttacgcaaacatcgattacgattattgctaatgcggttgaactacctaagcaatacaaataccatagtcagtctaaacaaattatcacactggggcgcttaggcgaacgtaagggcacctacgatattctaaaattagcaggggtgattcaatcccgttttccggatattcaatttacgttgtatggtgatggtgaacaggggaaggtccagcaagaaatagaccgcctaaagttaaccaatgtgcgccttggtggctggttagctttggcggatcgcaataccgttattcaagaaagcctgttacacctattgccctcatatcaagaaggcttaccaagggcaattttagaaacgatggcttatggaattcccaatttagctacgaatgtcggggacattccacaagtaattgagaatcatgtgagcggggatttggtgacaccaggagatgacgctggcttagttcaacaactcagtgattttctaggtagtcagatgcgacgtgaaacatattcacgaaatgcccggcaaacgattaacgactgtttctcattgcaacagtattttagccggtggcaccagttttatcaaaggattatgaatgaaacggaggaggaatgatgaattctatagcgcaatcgactgataaattagagttgattaatttctatcatgagatggctcaaatttcagcaaacattagtcaaattttaaatgaagacggagttaccatcgaacaaattcgtattttacaaacattaaaacgctataaaggtattaataatagtaagattgcacaagtattaaaaacatctaccgcagcatcttcaaataaattacgtaaattagaggatcaggggtatatcagcaaacaatatggcaaacaggatgatcggcgaattgttgatatagcagtttctcccgttggagaatcaatttatcgtcgatttgagcaggcgtgtgaaacttacattaaaagtattactgaatcagataagaaaattagcatgccagaattaatgcagctgtttgaaatgacaaatagacttgctagaagtattcggacaactgaaattgaatagacaaaaaaagtgcccacaaacggttaaatttgtaggcactttttttgatttatttttgttcagcatgttttgctgcaattaatgaacgatagttgaatagtaagtttaagataacagcgctgagactgccgactactaagccgttgcctagaattgtgcgaacactcgttggtagtgattggagcaaggttggatgaattgctacccctaagcctaagccgattgaaacggcagcgactagtaagttgcggttatcatcaagatcgactttgtgtaacatcttaatgccttgaatcccaacagtgccgaacataacgaccatcgcgccccctaaaacagcgcttggaataatggttgcaacggccccaatcttaggtaataatcctaagatgattaagaagaatgctgagtagtaaactggttttttcgttttgataccggataattgaacaatcccaacattttgtgagaacgttgagtaagggaaggtgttgaacaatccccctaagatagcggcaatcccttcagcgcggaagccccgcttaagatcattgctagtaatgtcgcgcccaacgatttcaccaagggcgaagaagacaccgattgattcaatcatggtcgttaacgcagccaatgacattgaaacgattgatgaccattcaaaacgaggtgttccgaagtagaataattcaggtaatttgaaccaacttgcttgacctactggatctaaggacacaatcccaatcgcagctgcgattaaggtcccagcaataatcccaattaaaatggcgatttgttggatgaagccacgcccccagatactaaaaatcaggattagggcaatcgtttaaaaaccggtaattaagtttggtgtactcccaaacgacttagcagcaacatcgccaccgcctaagttttggaaagcaacgggaatcaatgtgaatccgattaatgtaatgagagaccctgtgacaactggtgggaagagccaacgtaaacgtgcaaacaagccagaaactaacaagatgaaaattccggcgccaataatactaccgtacataacgtcaattccgagttggctgttagtgccgatggcggctaacgggccaacgtactcaacagcacaacctaggacaaccggtaatgcaatcccggtcagtggggttcgttttaattgtaatagggtcgcaaccccgcacatgaaaatatcgactgaaacgaggtaagtcatttgagcggcattaaaatgtaatgcagccccgacaagtaatggaattaaaacatcgccagaatacattgctagaagatgttgtaagccgagaatcgctgctttaatgtggggaagcttttcatttggattaattggctgtgctgaatttgagtgtatatctgccacgagtgtccctccaagataatcgttaaaatttagttaacatttagtttagcacacgccaatagtgacttcaattagaaattaagtaaaaaacgaatataacattcttaaataatcgcgatagttcgcctttgtgatgatgcacaccaactgttcgatgacaaaagtgctttcttactgaatgattcgcttgaaaaaggcgataattgttcttaaattaccgagtattatgtttcacatgaaacgataatctgaaaactgggaagaatcttgtttttttagggtaagtacgttaaactaaaaggtatatgtgaaacaataatgttccacgaattaaacgcctactttaaagcatagttaaggagaaataatgacaccagcgggttttgcagcaacgttaaaaacatacaatattcaagtttcacaagcacaaatggatcagtttgaattgtatttcaatcggcttgtacaagtgaaccaacaagttaatttgacagccattacagaacaagaagcagtttatctcaagcacttcttcgattctgtcacaccaactttgtatcttgaaaaactacgcactgaaccccttacgatctgcgatattggtgcgggcgcgggttttccatcgttaccaatcaaaattttattcccgcaattgaagattacaattgttgattcattaaacaagcggattcacttcttagaagaattggtccgtgaattaggcttgtctgatgtgacgttggtccatgatcgagcagaactgttcagcaacccgaagagtccatatcgtgaacagtttgatattgtgactgcccgggccgttgcttcattaaatgtactggtagaattctgtttaccaactgttaaagttggtgggcagtttatcgcattaaaagcgagtcaaggtgaaacggaattggcagaagccaactatgcaatcgaaacacttggtggccaatttgcacaagacattgctttgacgctaccagaaacagatgatcaacgacatctaatcgtaattgataaggttgtaccgacacctgccaagtatccacggcgggctggtgtgccagttaaaaaaccgttaatggctaaggaggaaaaataatggcactctcattttttaataagaaaaaagacgataaaagtattaatcaagtgatcaaagtaccggtttcagcaattgtgcctaaccggttccaaccacgaaaagtatttaatgcggacaatatcgccgaattagcaagcacaatcgaacaacacggcttattgcaaccgattatcttacgtgaatatgaagatcaaaaatatgaaattattgcgggtgaacgccgttttagagcgattcaaaccctcaaatgggctgaattaccagcgattgttcaaactatggatgatcacgaaacagcttcaatggccttgattgaaaacttacaacgcgaagaattaaccgccgttgaagaagcacaagcttataaggacttaatgaagctgaacgacttcacacaagctagcttggcagaaaagatgggtaagagccaatcttttgttgctaataagttgcggctattgaaactctcacaacccgttcaagaagccatcatgaatcatgaaatttctgaacgacacggtcggagccttttacggttggatgaattcaagcaacaaatgattttacaccaaatcttggctgaacaattaacggttaaggatacggaagcgctggttaacaagacgttgaatcctgaaccagaatcaactgaagagacagttgatgcaaccgatgacagtttaaaagaagctaccacgaaggctaaaaaagcgaacgataaagcaaaaaaagcaattgcccatgatacacgcattgccgtcaacaccatcaaaaagtcggttcaaatggttgaacaaagcgggattgccgtcaaagccaccgaagaagaacaagatgatgtttatcggattacgatcgaaattccaaagcaataagggaggctcattatggcacacgttatttcaattgcaaatcaaaaaggtggcgttggtaaaacaacgaccacgattaatctaggcgcttgtttggcggatgctggcaatcacgtgttaatcattgattcagatgcacaagggaatgcgacaagcgggattggggttcaaaaatcccaagtcgaaaaagatatctatgatgtgttggtcgatgaattcccactaaaagaaacaattattaaaacatcacataagaacttagacattgttccagctacgattcaacttgcaggggcagagatcgagctaacatcacagatggcgcgtgaaatgcgcttgaagttagggttagaaccagtcttagccgattatgattacgttttgattgactgtccaccttcattagggcaactttcaatcaatgcctttacggcaagtaattcaatcatgattccagttcaaagtgaatattatgccttagaaggattgagccaattgttaaacaccgttcgtttggtgcaaaaacattttaacccaaacttagcgattgaaggcgtgttgttgacgatgtatgatgcgcggacgaatttaggggctcaagtgattgaagaagtgcgtaagtattttggtgatcgggtttacgacacgattgtgccacggaatacgcgcttagcagaagcacctagtcatggcgtatcaatcattgattatgatccaaaatcacggggcgctgaagtttaccaaaatttggcaaaggaagtgttagcagctcatggcaactagaaatggaaaaggattgggccgcggtttggatgctgtattttcagcgttcgaaggccctaataaaaaccgggcggatgaattagttgaagagattgcacttgatgatattcgtccaaatccctatcaaccgcggaagacatttgatgaagcggctttggctgaattagcagcgtcaattaagaagtcgggcgttttccaaccaatcattgttcgcaaaagtattaatggttacgaattaattgcgggtgaacgccgattccgtgcgtctaagttagctggtaaaacagcgataccagccatcacgcggcagtttgatgaatccgcaatgatggaaattgcggtcttggaaaacctgcaacgtgaagatttaacgccgttagaagaagcccaagcttacgatacactcttgaaaaagttaaacctgactcaagctgaagtatcagaacggttgggcaagagccgcccatacattgccaattacttgcgcttattgggtttacccaatgacgtgaagacgttattacaaaatggtgacctttcaatgggacaggcgcggacgttattatcattgaagaaaaaaagtcagattagtgcattagcgaaacgcacgattgatgaaggcttaacggtgcgacaactagagcagttaattaaccagatgaaccagattaaagctgcgaaagtgacgaagaccaagattaaatcaccctatattcaagcgagtgaaaatcaattggtcgataaatttgacaccaaggtcaatattgcgattaacagcaagggtcgcggaaagattgagattgattacagcacagtcgatgatttaaaccggattcttgcattgctagatgtgaatatcgattaaagtgaggagtcgagctagatgtatacattaggcgatcttgttcagatgaaaaaacaacatgcctgtggcaccaatcgctttgaagtggtgcgcttggggatggatattcgaattaagtgcatggggtgcggccacgccgtcttattaccgcgccgtgaattcgaaaagaaacttaagaagaatttggtgcctgcagcagaagtcgttgttgcggatgaaccccactatcaagagatgcaacaaggtcccaaccaaactaatttttaaagtaaaggaaagtgtaaaaaactatgtcattaaccgcaggaattgtaggattacccaacgtcggaaaatcaacgttatttaacgccatcacgaaagcaggcgccgaaatggcgaactacccatttgccacaatcgaccctaacgtcggcatggttgaagtccctgacaagcgtttagaccggattcaagaaattatcccggctaaaaagatcgtgccaacgacttttgaatttacggatattgctgggatcgttaaaggggctagcaaaggtgaagggcttgggaacaagttcttggaaaatattcgtcaagtcgatgcgattgtgcatgttgtgcgcgcctttgacgacgataatattacctctgttaccggaactgttgacccgttagacgacatcgatacaattaaccttgaattgagcttagctgatttagaaagtgttacgaagcgttatgcgcgtgttgaaaagattgcgcggacgaaagacaaagacgccttagccgaattcgaagtgcttaaaaagattaagcctgttcttgaagaaggcggctcagtacgttcaatcgaatttaatgaagatgaagcgaagttagttaaaggcttcttcttattaacatcaaaaccggttttatatgttgcaaatattgctgaagatgccatggctgatcctgatagtgtggattatgttaaacaaattcaagcgtccgcagctaaagaaggcgccgaagtaattgccatctcagcaagaactgaagaagaaatcgcctcattagatgatgccgataaggctgaatttttggaagccgaaggggtgactgaatcagggttggataaattgattcgtgcttcatatcatctactaggcttagcaacattctttaccgctggtggaaaagaaacccgggcatggactttccgtcaaggcatgaaggccccacaaaccgccggtgtcattcattccgactttgaacgcggatttatccgggcagaaacagtttcttttgctgatttagatcaatacggttcaatgcaagctgttaaagaagctggccgtttacgtttagaaggtaaagaatacatggtcgaagatggcgacatcatcgaatttagatttaacgtttaatgataattgaggaggaagacaattggctaagaacgaacaaccagcagtaaccccagaaccagttgatattgaagggttagaagcaaaactcagtaagaaaaatgcggactatttatttaagttcaaacgcgcattaaatgccgaacaagtgccagcagaacgccaaactgaaatcttggcagaaatgttaccagaaatggtagcagaacaacataagggcaagcctgcaacacaagtatatggtccagtgacaaccaagattgatcaattgttgcacgcgccaaaacgtcctaagcaaacatcacttcaactccaaatgcttgataacggcttaatctttttaattatgtacctagcctttaacggaattgcggcttatttctcaacgaaggggtcagcaactagcattgggattacatcaattgtcattacggctgcgcttgcagggatcatcatgacttatccaatgcgctatacgcaaatgccaaaagaacaacggccaccattttggaagatggcattggttgtaatcggcttaacactagcctttgttgcggcatacggtgtgacaatcttgattccaagtttcttgaatccagtcttgccaccacttgttcaaatcgtaattgcagcactcttaatcggcgtgcggatttatatcaaacgccgttttaagattacaggttcattcttcggttaatattacccgggaaataaatggtaattgaggaggatttgagatgattagcactgaagaacggcaaattggggcagtcagtacgttgattgtggccccaagtggtcaagaaaaagcggtattaccaactgtctttgtatatcatggttggacgcaccgtaaagagtcagaattaatggtcgcccactttttagccaaggctggttttcgcgtggtcttaccagatgcgaagtatcatggtaaacgacatggtagtcagctcttttctgagttaatgtttgaattttgggatattgtgatgcagtcggtcaccgagtttggtgaactggttgcaacactgagtgctgaaggcttagttgatcctgaacggattggtgttacagggacttcgatgggtggcattacaaccgatgcgattctcacccgatatccgaatgtcaaaattggcgttgataagattggcgcaccaatgcctgtcgcacttgctaaatggcaggttagtcaattaccaacggccttacaaaccaagtatcaagatgcgattgaagataccttagcacggttagcggcgtatgacttatcaatgcacgttgatcacttggcaggtcgtccattgcatttctatcatggaactgctgatacgatggtgccatatcaattcacggcagattttatgaccgaaattcaggcgcaaccaagttcagccaccgcattagtgacattgacgacggaagaaaatgggcaacataaagtatcagacgatgcccagctcaaaaccgttgaactgatgcaacagtacctactttaaaaatgagaaaagccgccagaacgtaaattgttcttgcactaggccctgtcaagttgacaaatgaaataatataaagttgaatctgtctctatgcggcttcactccagtattcatctggggtgaggccgtttctttgtgctgagcggttgtggtgattgaaatattcgattccttcctcaaccagtcttacaagctcttcgcaagtctttgctagtggatggcgagccatccaccgtaacttgaattcgttccaccagcgctccatcggtgcgttgtcgtatggtgttcctggtcgagacatgctacgtgtgacgttgtaacgaccaagaaagttgttgaaggcaccagaggtgtaggctgatcctcgatcagtgtgaaccaatgggtggacgtcgccagaagcctcaaaggctcgttggaaaacctcgatttctgctgctgacgtttcagtagtgctcaaattgtaggacaacaaacgtcggccgtagagatcaaggacgccactcaagcgcaccttatacttattatttacgccgtaagtcagttccgttgaatcggacaaccagacctgattaggactgtcgacgtcgaagttctgattgagcacattgtcttgaatgtgctgttcgttctccttatgtcgactgtgcttcttgacccgaatttgacatgtcaagctgagctcccgcatcacacgacgtaccatcctgaaagtaacggggaagtcaattaggtcatcatgttgaagattcaataaaaggttcccagcaccgataccttgatgatgaaaatcaaaccagtattgtgtccgttccttgagctgacgattacgggcttcccaagctgtttcttctcgatttaaccctttgtagtaagcctgccggcttacaccgacaacggccaacagcgtagatattgcaccacgcttgccttgactgacctcattaattgcgaagtaagacagtcgatgttgtttactcaccccctgcgctggatttccagcaatttttttgcgaatgcctccacaagctctttgtctgcgagctgtgctttgagctgcctgatttcaagattggctttatcgagttcagtcagctcagcttgttctttgtgatggccacggttgtccacgagcgcctcatagccgccgtgattggccttgattacccatgaacgtgcttgttgataagagacttggaagcgttcagcggcctctgtgtatgaatgattcagcttggtgacatactcgacaatttcaatgcgttcttccaaggttgttttacggctcatagtgggaacctgctttctggacggcgacgccgtcaaaggtttattcccattatacttgtttacccagtctacgacttgctgcgatccacgaagtccaaacttatttgcaagttcatcaaaggtgccttcgcctataagatatgcgtggactactttgagcttgagttccttcgaatagtgtttgtttttcttagcctcctttagaccattaattccatcacgggagtatcgatctcgccaacgctctagcgtcttatgattaatgccatggcgattggccaccggacccagtccaatttttgattgggtcagttcatctaagattgttaatttctcgagtaccgtatgtttagatctgggcatacaaaaatccctccatagtcgtcagatgaattattgtatttcatctgacaaccataaagggattatcgcatctggcggcttttttgatggggacacaaaaaaaccagccttggggagactggtttctagcagatccgaagatctaaaaaggagtaaggggtacacgtattactttgggggaataatacgtgcgtggtagattgcgtctaccttaattttactttggaggagtaaaatgaaaaagttaagtagtatgaaatagaaaagattcgcttttctatactcaatactataatgggaatttgtgaagattttgtgaccagaggtttatagatttatgaaaaaagcaataaggaaagtttaagggtcaaagagtatgctaaaatgaaggtactttataagagatcgagagatgattgatatgacaaaggggaccgttttatttgatttggatggaacgatagccgattcgcaagaaggcatcgtgaacgccttggaatatatgattgaggagttatcattgccgacgcaaaccaaagctgaactggtcacattcattgggccacccctcaatgaaacaattatgcgtgagtttggtttaaatgcagctgctactcaagaagctattaaagtctttcaagcctattatgcgcctaaagggttgtatgaaaatcaactttatcctggcatgcgagaaaccctagcggcattgcaagcacaggatttacaactggcaattgcgacttcgaaaccagaaccattcgctaagaaggtcattgatcatttagagttaagtgattactttagcggtgtttttggagcaagtgttgatgagacaacgcgggtcaaaaaagcggatgtcattacttacgcattatcagaacttggtctagcgccacaaaccgcaccattactgatggtgggtgatcgccaaaatgatatcttgggcgctaagcaaaacgcgatgaatgcagttggtgttagttatgggtttggcacaatcgcggaactcaaaaaggcgggtgctgtccaaattgtccaacaacccaccgagttaatcacatcattaccggctaatcttaaattttaggcatgctgttgcgcgttagcgaccattaaggtataaatccgcgcgacatctttcgcattgccacggagctcataatcggcgataaacggtgcatcgaattgtaccgcataccgtttagcagttaagcaatattgttcgttgaagttgcggttcccgctaccgattactccataacaaaggcgtgcgttctgcgcataatcgatgtattcgcctaagctattggtcattaattctttaacgccattatcaatgccgttgccaccatctaagtaagttggaacgaacgcgtaaaacggttcggtctccgctttaaagggggtcgcatccgaaatttctgtgagggtaatggttggtaacgctgggttattagcatgttgttgcgccgcataatcctgtaaatccgttacaaatgaacgtgtattaccagcaattgaaatatagagaatcgttaaattttttaacattgaatggcctcctgtgactgataagttcactttagcatttaatgattaagaatcctagtcttgaagtttaatagggttcgtgaatagaaagggtgtttaatcaatggaaccaattagtcgtttgaatcaaaatcaaccaagcgtgcgaccacatcgaggtttaagtcgctttttgacgttcttaatctttctttgcgttttccttggcattggtggcatgattctcagcctgacagttttgagagaatcatttacgcaagaacagctcagtgaaccgaagacgttagctgcgatgactgataaaattaacgttgttttattagatgcggcacaaaaaaatgggctaccaactgaagtacaagtcaaattactgacccaatctgatgtgcgggccgatttaaagaaaactgttcataatatttatataggacaagaaaagccgttacccacagcacaaatgatgggacaacttgcagcccatttagaagcagttgtgcctgaaaatgcgttgacggaatctttaattaaaacggcagtggttgcggttcaaccaccactacaagaatacctcacgaaccaaattgaagcaccttacttagcaccattagcgactaagatgttgtttgttagaaatgtgatcaatatcttaacctgggttgcaattattatgggaattgttcttgtactagttcaatggggactaagtggtcaattccggtatgtattagggagtgttggtgcaagttttgcttggagtggcttattcttggcactaggggcggctgcgtttaaatatagtggcattgttgaacaaattgctcaaaaagcgggcgattttaatcaaacaattaccgactatgggttggctgttctggattatggtttgaagacaagcacgattgttttaattggcggggcgattgtctggttggttgcaacgcttctccaaagagtacgacattaaaaaagatgacctttgcgggtcatcttttttaatagggcgtaatcacgatttcatggttcaagtagttagccatgtagatttgttgaagactgtagccttgctgttgaatgtcggcgaggagccattcttcagtttgatcgattaattcaagtgcttctgaattaatctggccgtccataatcagcggatatttaatcgtggcgtcgcctttttgcgtaatggttaattgtccgttttgttccaagattgcgcgactgaccgtgcgaatatcgctaatcccggcaattcggagtttaaacgacagatcctgtgcggataaactattcttagaggccgtttgaatatcaatgtggccgttggtgataattgtttgtggattaccaattacccagcgtttaatccagcgattgtgagtggttagaaacttcattgtgaagacgattaaggtccagatgagtaaaacgagtaagaattgtaagagcgagatatcggcattataaatcataccgccaacaatccccccaagaacgtaattttggagttgatcaatcccactgctaggggctaaattccccttgccagagaggttgatttgtaacactaaacagaagaaaccgaaaattaatttaatggtaatatcgaaataagatggcatagtaaactccttaatcttgataggtgatgtcttggctaatcaactgagctttttggagttgataactagtaaaattgttatcaaatatgacttggtagttttgatgaccgacgcgcactaccatgttttgctgaagcgaagtcgtgttgactgcgacggttttaaggctagctttctgcgcagtcgccacacttctaatgaattgcgccatctgagcttgttgcgagtgggcggtgttaagctgttgaatccgtgtatattgaatgccggcgagtaaaatcccaactaagccgaagatgattagtaagtcacggtacttcgaatctgaacggtggcggagatattgaacgaagaagatgatgattaaactggcgatgatcactgacagacttagtttgagatagaattcgaaatcattctgattgctaaagtatgaataccgataaaaaagcataatgacctccttaaataaacggttaagcctattgtagcacactggctgagcagatagattgtgtcaaatttaaaacggcggtagactggaagcatgaaagggatgattgatatggcattaaaaataacacctgcagcagttgcgaaaatcaaggataagatgacaccgggtcaaaaaattttattggacttagatgatggtgttggtccattttcaaacgttggttattgctcgttggatacgaactttagattgctattagtaccagcggatgctgacattaaagattatccagatgaatttgaatcaaatctaggggctgtttactacaaagattatgcagctggctactttgatgaacatgaagtattagacgttaacgaaaagaatcaaatgttaaccttgagtaataacagtggcttaattgatgggcacatctccattgtcgtatttgagaatgaatcaatgactcattaataactgtggcgtcgggcagaaagtggtccggcgttttttgttgttcatttgtactttatccacattggtgggataatgacaaaaacagttttattgaggagcctgacatgaaaacagcaattgtgactgatagtgcggcgtatttagatccacaagttgccgccgaccataatattactgtggtcccaatcaccgttatttttggacaacaaacttatttggaaaatatcgatatcacgagtgaagcattttacgataaaatgcgcactactgaaaaattaccaacgacttcgcaaattacaatgggtcagatgcaacaggtttttgatcaattgataaaagcgggctacgatgaagtgatttgtatccatctttcaagtggcattacgagctttgtcaataacctaaccgcctacgcacagtcggttgaaggcatcgaagtgtatccttttgattccaagattacgagtgccggtgaagggttcttggccttggaagcggcgcggttagttgcccaaggtgaacatgccgcaactatcatgccgaaattggtagctttacgagcaacgatgggcgtttatttcgttgtggatgatttaagccacctcttgcgaacgggccggatttcgaatagtgcggcctttgtcgggaatcttttgcggattaaaccgattttaagttttaacgatgccggccaaattgttgccttaacgaaggaacggaccaagaaacgggcctttcaaaaagtattagcagatttcaaagcagcagtcgaatctgttgactatcccgtacgcgttagcgtgattgacggtaataatccagaagaaagtgcgcagtgggtcgcaacgttgacggaaacattcccagggatgccgattgaaacgagtcacattggtcctgtggtcggcgtgcacaccggcgaaaaagtaatggggctcatctggagtcgtgattatttagcataacgaaattaaaaaacagccttgcgcatttgcgcaaggctgtttttgtttaaacatgtgctatcagccatctccttgttgttaatcctcaggagatggctgatagcaaactctttttttaattggtttcaataattgtattgttggctgtattattttgtggttcgctggagacttcaaaccagtcgatgtaaccgcgattgaattcgaccacttttaatgtgaattgattgatatgaatgaccgcactttgttgtaagtcggtgaagttttctaagacataaccggccagggtcacgctatctgaggcttcgaaggcatcaattttagtcttgaagaaacgttcgaaatcatagagcgtcgttttcccactgacacggtaacggttatcgtcttctttgatgatatattcatctgaaacatcgtcaatttcgtccttgacggtcccgaatagttcttcatagatatctttatcagtgacaatcccactcgtcccaccgtactcgtcaacgacgaccacaattggggtttgcttattgatcatttgattcaacaaactgtgaataggggttgcttctggaacggagataatcgaacgcagtaatttgctgacgcggattgaatcgtcaacttgtgcctgacggactaaatcatatgcgtagacgtaaccaagaatcttgtctttatcattttcagcaaccactgggaagcggctaaagccttgttgtaagtagtcttttaagacgtctttaacggtatcggtgatatcgacgacgtagagacttgtgcgatcaaccatcacatctttggcaatccggtcattaaagtcaaaggcccgttgcatgtaaactaaatcgttgcgatctaattcaccaccagtgacggcatttttagagagactaatgatttccgcttgggaaagcacatcactaccttcttcagcaggtgaaaagccgattaatttcacaacacccgttgcggaaatgttgagtaaccaaacaaatggatagaagataatatgacagtaatggaggggcttagcaacagccatcaacatctgcattggaatatcaatactaatattcttcggcacgatttccgtgaaaaccacttctaaataggttaagactaacacgccggcaactgcgccgatgatgtgtaagccaccatttgaaatcaggtgagtgagaccgagcagatcgactagaatggtttcgacggttgattcaccaatccaccctaaaataatcccggcaacactgacccccacttgggtggttgagagatattcgtttaagttttgcgtcattttaagcgcaagattcaattttttaggattaccatttcctgaatggatggcatcttctaaggcacttggccgtgtttggacgagcgcaaattcagcggccacgaagaaggcggctaaaaagaaggtgaccaacataacaaatagattagtgaataactcaccacttgacaaaataattccccatttcttaactaactagttctattttaccattctcaagcttaaaacggtaaataacgtcgggctttagtccgattttatcggattcaataataatgaaaataccataatttagggaagaggtaaactaaattgttaaatatctaaactaaaatacgctttgtcacattttgacgttgatctgtatcgaaaaaagccactgtgttagtggcttttaaacagttttagaatgttgcagtatcaggatcttgcgcgtgtccaacgacgccgtcaagtgcatcaattgcagccatgtcttcatcggctaattcgaagtcgaaaacttgggcattttgttggatgtattcagcatgcacagacttaggtaatggtaagaagccgtgttgtaatgaccaccgtagtgcaatttgtggaattgagcgttggtatttgtccgctaattcttgcatttctggcacactgaaaatcttcccagtcccaagtgggctataagcttctaataacatgccatgttcacgtgagtattgggcagtttcaggttctaattcgccaggggctaagaagagttggttgaccattggttgtaccgttgcagtctttttgagcgcttctaaatggcgaacacggaagttgctgaccccgatggcccggactttaccagctttgtagagcatctccattgcacgccatgtttcggcgttggctgtttcccaatcatcacggtaggcaattgggttgggccagtggattaagagcaaatcaacgtagtcggtttgtaatttcttgagtgattcttcaaaagagctgattgttaaatcataagtgtgattactattccagattttggtggttaggaataaatcggaacgatcaacgccactagcttggatggcctcaccaacactcccttcattaccgtaagcttgggcggtatcaatgtggcgataacctgccttgagcgcctcttcaacagcagctacggctgtttgaccgtctggtgtttgccaagtcccgaagccaattttaggaatttgcacgccgtttgtgagcgtgtatgaactcgttaagttagacatattaaaacactcctttatcagtttaaaatttctacttacagtttacttgttttcgatagagatagacagaaaactgacttattccccgggaaataaaatcgatttgtcataagctgagcaatttggcctgaagtgcgggatcaacagcatagaggtaaaggccgtttctagcgcggctcattagaacgtagaggctattaagaataatttgctgtttcgcggcttcaggatcagccagctgtgctgcgccggcaaatgcggcttggtcctcgtaatattcaggatgaataactagccgctcactttgtggatcatacgtgacggatggcccgatgatgacgccggcatagttgagatcaaagccttgaatggtgtacacggatccgacttcatctatactatcttcacgttctgcccaataggttttagcggttggctgataccgatcccagcgtaatttgaatgtcgatgtctcaacgaagtgatcgtgaccatcattgagtgttgctggaaaatcgtaagtagctagcatgcgtgcaagcccactcgtttggtttttaaagcgaatcgtttgatagagctcattggcatcggtgaatattttgaattcaaagtgtggatcatgtggcagggcagcgacttgttgttgatgaaaggtttgcacccaattttcaacacttggatgggcttgcatccgaaattgatgggttagttgcgcggtctgatggggagcagcttcaattcgttggcggagttgttgctgttgccagaagctcttcactttaagcacttgctgttcatcaaaaatcagaatggtgatccgactgtgtcggcgaatttcatcgagttgatttgtttgattgaagtggctataggggtcggatttggttaacagtaggtgtgcctcatcaacgaggacgatatcggcaagttggtggtttttagccgcttgattgatgaatgtcgttgggcgttgaaaatcttttttcaataaaacgggggccgttgttgtgccacttttgtagaattttagcatttctggatgattgaccaataggacgttttgactgccatagagtggcgaggtaggtgtttggcgcgcaagtgtctgcaacgccttgaagacactgctgagaatcacgctcttaccagtcccggccgcaccttgaatcaagaaggtggcgtgttcggcgtgcgcgtttgccaaacaaaattgaatgacttgttcttgtagtgcttgttgttccggtgttagttgattggcgggacgattgagtttgtaaagcgcgctattttgacgctgtgcatttggcaaagtgaggactcctgttcattcatttcaataaaaaaagccccagtagatgtagaaataacatcgcctagggcagtggtgctaatcgacaaaaattaattggaattcgtgttgcactaaatcaagattgacggagacgtggcggttgagatcggccacaattttacgcgctaatgtcacccgttcttcgaagcttgtggcaagtgccgcaaattcagtttgtttaaagttgtagttttcagtgataaaaatcgcgtctgtgacatataacaggttattttcatcgtgacgagaaccgctctttaaaacggcatcgatataatggtaaagctgagtaggggcaaagttcaatggttggtctaaaacggttgtaatctgaaaatcaggtaaatcgtcaaccatttgtgtgtttagtgtgacttgggttaatgcttgatacagtttcatagtgacaccttcctaatgttgagatttaaggtcgtgcttgtggagcttctaagtggcgttgaataaagcctaacgtcacatcagcgataatggccatcagggcggttggcagggcaccagctaagattaaggcgccgccattagtggcgttggtcccgcgaataatgatgtcgcctaaaccgccggcaccaacaaacgcgccaatcgctgtaatcccgatggcgaccactaaggcattgcgaatccccgccataatgacggccaatgataagggaagttcaaccatccgtaacagttgccaatttgtcatgcccatcccgattccggaatcgataatattatcggaaacattctccataccggtgtaagtatttttgataatcgggagcaaggagtataaaaagacagtcgcaatgacggttcgtgtgccaagccccaagccaagcataatgattgagagcattgcgagtgaaggcactgtttggatgacattcgctaccccaattataacattactgagctttttccggtgcgcaataaaaatccccaagggaatgccaatcaacgcggcaagtaaaacgccataaatcgaaatcaaaaaatgctgactaaattgccgtaaaacataactgccattatgctggaaataatagacaagttgttgccaagtatttaaattagtcatttagcggctcctttccggaaataattatgttcctgaagaaattgttttgcgactactgcgggttctagtagatcattatcaactttaaagttgagggtttgcatggtgtcgaggtcgattttgccatctagacggtgtaaaaggggcgctagtgctggctgttctttgagaatctgatcagtggcgaccacgctcgcatcgtatggtgggaagaagcggcgatcgtcttttaagacttttaagtcataacttttaatccgtccatcggttgagtaacctaaaacgacgtccattttaccagccgccagtgcgctgtaaaccagtccgatttgcatgggcgcaactttcttgaaatcatagccatacgtttctttaaatgcgggatagccatcgccttcgtgatttacccagacggaatcgacaccagctgttagttgatccgccacttttccgagatcactgacggtttctaaatgatatttcttggcggtttcctgggtgaccataaaggcataggtgtccgcaaacccgtaggaagggaaccatgtttggttgtaacgatctttgaaagcttttttaacgattttttgggctttttcaggatctttagtaggcttcatttttaaagtaccagtaagttcagttccagcgtagcgactagcagctatgtcggcgtcaccacgaattagtgattcatgcgttaccgttgaagaacccagattattaattaaagtgaccttattttgtgtttcgtgggtaatcaactcgctcagaatattggcgagaatttgtgactcagtggtgcttaaagagctaatgcgaattgtttgtgattgacggtttccgatgccaagtgactgacagccacttaacaggaggagactgccaactaataatccgcaactcgtaatgaatcggcgtattttatgcataggagcctccttatctgattgcagcgggggtcagttgtttttccaaccggcccaagccaaaatcgactagcaatgctaacaatgtgacgggaattgtcccgccgatgattaaatccggtttgaaaagattcaacccgttgaaaatcaagtcgccaagaccaccagcgccaatatatgaagcaagggttgcccaagcaatcacgtaaaccgcagataggcgaattcctgccataatcacgggggtcgccattgggatttccacttgcataattgattgtaccggcgtcatgcccattcctttagcactatcttttagaatcggatcgacatcgttcatgccgatgtaggtgttccgcaaaatagggagtagtgagtagataaataaggcgatgattgctggtactttgccaatcccaaagagcggaatcattaaagccaatagtgccaatgaggggacggtctggagcatgctggcaatggcaatcactactttggcagttttaggaaatcgggtgagggcaattccaaggggcaccgcaactattatgcccagaactaaggcgattgcggaaatgtagagttgttcccaagttttaatcagtaaatcagagccatgttctgttaaaaaagtgagcatcatcgattcctccctttctattgttggtcggattctgcttcagattcgtcagtatcaccccagacagcatcataaacgacatcgactagggctgtccgagtgacaatcccaacaagttgatgatcatcgttggtaacgggaacgtatttccagccccgtttaagaatccgttcaatggtatcccggaccaaatcattttcgttcacgtaactaatcttggtagacataatgtcaccaacactagttgcgtctttgtaatgatggtcgatattttcaatatcgacgagtccctttaaatgttggttttcgtcgacaaccagtaaggtatcaacgcggcgttggcgcattaagcgaatcgcatcaactaatgatttacctggtgtgatagcgactggacttttaagcatgatttggccaacagtttcgacatttggtttggcttcgatcaaacgatcgtgaccgattaagtcttcgacgaattggttggcaggatttcgcaagatttcattgggcgttcccatttggatgatttggccattatccatgatggcaatgcgtgacgctaatttgagtgcttcatccatgtcatgggtgacaaagacgattgttttaccgagttctgattgaagttgttttactaagtcttgaagtgcctcacgcgtaattggatcgagagcaccaaatggttcgtccatcaaaataatatcttgtccagctgcaagtgcgcgaatcaccccaattcgctgttgttgtccacctgataattggcttgggtaacggtctaaaaagtccgcaggcatttccactaattttagtaattcgagcgcctttgcatggcgtttttctggggaccattttaagagtttagggacaattgtgatgttatcttgaatagtcatgtgtggcattaagccaatattttgaatgacgtaaccaatttttcgccgcaatttaacggggtctacattagcgagattttcaccatctaaggtaatcgttcctttggttgggttaatcatgcgattaatcatccgcatggttgttgttttcccagaaccagacgtcccaatcaaacaaatgaattcgcctttgtcgacagtaaaactgatgtcatcaacggctttgttaccaccgcgatagagctttgaaacgtgatcaaacgttagataatgtgtcataaggaacctcctattgtgatgattggaaatttattgctatataataactatgttagatacgtaacatgcaactgtcaatgaatacgccttactgataggtatcaaaaagccggtgtaacggaattgagaacgttacaccggccattaattaacctgttgatttaggacgataaagaataaagtgggcgattaaagcgagacattgataagctaacgctaagagacaaacggcgacccagccaccgaagctccaagcgagggcgccaaagaatgaaccggaagcaccacccatgaaataggcaaacatgaagccggtattgttgcgactactagtggcttcaccaagcatttggacccgggtttgattggcaacctgaccgcactggtttccgacatctaataaaacaatcccgagcattagaatcggcatgaaatgcccccagaataagaataaaagataactgatggtcatcatgaataagccagtggcgataataaagcgaggtgatttagcatcggctaagcgaccgataattggtgcagctaaagcaccagccgcaccaaggattgctaatagaccaacggtaccactaccgagacgataggcgggactggccatatagaaaatgagtgtcgaccagaaaatactaagtgtcccaaacatgaaaaaaccgttgatggcggcttcccgtaacagccgctggtgcgcgataagccctggaattgaactgattgtctgccagtagcttggcccgttttttggacgggaatccttaggtaatttgagggttgccagaaggattaaaagcgcaatcgcaattgtagcgatgagatacacccaacgccaatgaatgtaactactaataatgccgctaaagcttcgggataggagcacacccattagaagaccactgagaatggtgccgagcactgcgccccgtttttgtggttgagcgaggacggctgcatatggaatgatgatttgaggaaccactgaggtgaggccaatcatcaaaccagtcaaggcaaagaaaatgaaattgggtgctaggtaagcggctaataaggatagtaaggataagccaagcatccgtaatatgagctggtaacggctcatcacatcaccaaacgggacaatcagcaacaagccaagtgcataaccgacctgtgtcaacattgcaacagtcccgaccgcaccacttgtaacgtggaaagtggtcgctacgagtgcttgaatcggttggatgtaatatagattggagacggcaacgccggtaataaaagccatcaaaaggattaatggctgcgtaaggactgttttttgcggagcactttctgacatactagggtggacctacctctctgaataacgttcttttagaatttgaagtgcattgtcgaattcaacttgggcttccggttcttcttcacgctttgcggctgtttctagaaagtctaaaatttcaggcgtgacatcgcgcactaattgactgagcgcccaagcagcagtgccgcgaatgacagggcgcggatcagtatcgatgagttcgagtaacttcggaatcgcggtgcggtctttcacgttggcgagtgcgataatcgcattgcgttgaagtggctttttgccacgccacgaaccagcaaggtgtccaaattgaagtttgaactgcttgttactaatggttagcacgggctgtaattcgggcatcacagattctggatctggctccatatcaggatggaagtggaagtcttttcctttattaaacggacatacttgttggcaaatatcacagccgtaaatgacactgcgaatttttggtctgaattcttcgggcatgaaccctttggtttgtgtttgataggataagcaacgcttggcattgaggcggccatcgcccattaatgcctgtggtggacagtaatcgatgcagcgcgtacagctgccgcattgattggccatcggtgtgtctggttcaaatgggatgttggtaatgatttcaccaagatagacataagaaccgaattcgggtgtaattaataaaccattcaaaccgatgaagcccaacccagcacgttgcgcaacagccacatcgctcagttcgcctgtatcaaccattggcttaaaagtaatttcagtatctgaatcagcaagtgtttcgatagcgctgatcagctggtccatcttatcgcgcagaatatcgtggtagtcaatcccccacgaagcgcgggcaaaactaccgcgtttagcaccagttcgcgctggcttattgatgatttttgttggataggcaagagcaatcgcgataatcgatttaggttggtcgaaaattaaatctggataaaggcgttcttcaagcactttatgttcgaatccagtcgaatgaccatttgctttttgttccttaagacttgcttctaaataatcaaaaggcgctgccgatgtgaaaccaatcttatcgatgccgatggttttgctcgcctcaatcacttgttcttttaaagtgggcattcaaagccacgctccttttttaagtttcatgtgaaacaaatgggttatgctaaataaattttgcgcaggtcagctaagttgtgttggcttaactggagatcgtgtgataaatagtcttgcaacgaaccattttcggattcaatcgcttgtttggcggtatcgaggtaatcttgatgaaccgttagtaatgactgataacttttgaacacagactggttctgtgttttttgttgtagttttgcaagcgattgggtcacgaaagcggcagaagcttgattcgttaataagtaatctgtgcgaatcgtttcttctggaacaccgagtgcactcaacaagaaaacagcgcccatcccagtacgatctttaccagccgtgcagtgaaacagtaaggattggtcctccttatcgtttgctagcaacaagtcgaaaaattgccggtaagcttgcttggagtgatcttggttaattaagtcgacatagacttgaatcatatgttcatgaccactttttggatcagcactgaacgttttaaaaagatcagcttctgatgccgtactagccgtttcatcaattttgaaaacgggtaaggattcatagattgcattggcagggaccttgtctggtgacttggcaatttcttcaggtgagcgaaaatcaacatcatagcgcacgccataatcagttaaataagctaaatcatgtggtgttaggtgggctagactagcggaacgtaagactttatgccatttaagggtccggccgtcttttgtttgatagccgcccaattctctaaagttatggcctttttcaagtggcaaaatgcggtgtgtcatatgcgtcaactccttatccaatgataccaatattgtagcatatttaatgggcaatcaacttaacttgtcagtatgtggggagaaacagtatgataggggtattaagagtggagtgagcagatgattacgtattttgaaatgacacctgagggccagttggttgaaggaacctctgaaaaaagtgccgactggattcattttgaagcaccaactaaacatgagatgcaccatttcgctaaaaaataccacttaccagcggtgttatttgaggtggcccaagatatcaatgaagtcgcacggtatgaaacatttacaacggacaccggtgaagtattgacccatatttgtttactggtaccagttaaaacccatgattcagaagatcatgcggaatatattacgcggcctttttcgttaatcattagtggccagacgttattaactgtggggcatcaacagtccgagctcatcgatgaaatactcacgttagaaggcctggatggtcaaattgaaacggttgctctaaagagtgtttcggccatctatcaacgttatttagcggctttagcggtcgttgcgcaacagattgaacaattggaagaaaatgtacatgtttcgacacgcaatcggttgttgtatgcactcaagtctcttaaaaagagtgttgtctatttggatttagggcttaagagtaaccagcaaattattccgcaaattaaggcaagtccattatttgagcgcgtgtcaggacatacagacttactgtatcggattgacttgcagtttgccaagtccgataaggcgattacaacgtatcgtgagttattggcacagttaagtgatttgctttcagatattatttcaaaccgattgaataatattatgaagacactaacatcactctcaattattctaacggttccgacaacgttaggtggtttctgggggatgaacgtaccggtcccgctagccgagagtaagttagggtttctcgtgctattaggattgtcattagccattagcctttgtgtcggttggtggttaaaaaagaaagactacttctaattaaatgttcgcggaagcgcttcgcttttttgcttgaattgtttttccaagcggtatattcttaaagtgtaacaggtgcatatagagaaagtgagatgaacaacatggttcaagaatataaaagaatactcgtcccagttgacggctctgaagaagctgaattagcactaaataaagcagtgtgggttgctaagatgaatcaggcgcgcttggatattttgaacgttttggataccaagcaatttgcagggagttatagcggcatgctttcaggagacgctattttccaaatctctgaagatgcacagaattatctcaacagtttaaaatatgatatccaaaccaatgacggtttgaaagatgtcgagattcatgtgcggtttggtaatcctaagaatgttatcgcacgtgacttcccgacagaatatcaaaccgatttaatcatgatgggctctactggcttgaatgcagttgaacggatgttgatgggttctgtgacagaatatgttaaccgcacagctatctgtgacgtgttaatcgtcaagactgatgttgaaaatcgcccttatcaaaaagcaagtaagaaaaaataaataacaatcccaaaggctaaaaaggatgaattctttttagcctttttgcgtagttcaatttaggaggtggtaataatgacaaaagctgattggatgtatgattcacctgaattattggcgtattaccaaacagagtggggaaaaccggaacatgatgaccaacgcttatttgaactattatgtatggagttgtatcaggctggcttgagttggcggactgtattaaataagcgtgctgcctttcggacagcatttaaagactatgaaattgccaaagtagcgcagatgacaccaaccgaaattgagcagttactgaccaatccggcaattatccgcaatcgtgctaagttgaatgcaacggtcaataatgcacaagccgtccttgcgttacaaaagagtgcaggaagctttgatcagtatctatggggctttgttgatggacagccaattgtaaatcggccccgaacttgggcggatgtccccgcaaaatcagagctatcgatccaaatcagcaaggatttaaaacggcggggctttcaatttgtcggaccagtcgtcatctattcattcttacaaggagctggcgtaattgatgatcatctgatgtcacagtaactttttggtgcagtcagtcgcgctaatattgcggatggtgtattatggagggatagaattcatttagattaattaaaggagtcccacatatgacacaggataatgttcgccaattagcagattggttagaagaaaacatggcagcaattgccgatcgcaaagtgcaattaaatccagaaacaatttttgctgttttggatgattttggcgttttaaataacccggtcgttaaatattttgatattacagaagaaacatattatcaatcagagtcagatcataaattaacgttatcagatgaccacaaattattaatcgatgtgaccgatcggattatggtgacccacgtggatggtgttttagctgaaaacaaagtcaactttgaatacagccacgaagctgtttatgaagatcaatatctcgttaaacgcgatttagaagtgttgacatatggtttggctgtcattggtgcagtggctgcaaccgttaaacataacttaatccaagctgatttgtctaaagatgctgtgttgagtttagctttggctgcgcaaaacatcgctaattggcaagcaaaataatccagtaaaggttggcaagttaaatgggagcagtgctagaattacgtgatttttcgcaaaaatatcagcggcgacaactttttaaacgtctcaatttacggattgatcggcaagcttgtatcgcgattactgggcaaaacggcgcggggaaaaccacgttgcttaacgtactagcaggattgacgaatattgaacgcgggacactggagattgcaccgaagatgcggattggctatatggctgaacaactcgctccaaatggactgacatctaagacttatttgcggatgctaggagaattagatcagtttagcaatcgaaatttagaaggtcagattaatgaattagcctatgaatttgggttagcggcggcacttaatacaccgttaaatcaattgtcacgcggtagtctgcaaaaagtgaactttgtgcaggcgattttgcggaccccagatattttattgctagatgaaccgttggctggtcaagatggaacgacccagatgcggatgattcattggttgaaagactaccgccaaaaaggaggcgccatcattgtcggcactaacaacgcttttttaatcgaacagttggctactgaaatttatgaactagatgcgatgcggctattgccgattgaagaattaccgcagccggaagaaaaggtgatgcggttagaatttgcaactacaccgcgatcactcgcacttcccgctactttacaacagttagctttaaaaattgttgatggtacgcggtacgtcgtcttgtatgcaaatatcaaaaatagtgatgaattaattcaagcaatgttaaaaagtggctttagcctaagggggttacgttatgaagtcctttagtgcacagttacgtttgcatcagaaaatggtttttgataatgggaatttgtgggggcctttgctattttggatagtggccttattagtcaattatgcggtgcaaccacaagatttcgtcggcagcctcgctacattattaatgacactgtttatcttattgacgtggttgacctacagttacatcaatcaatttccccttcaaatggaaaaacttttaattttaaaattaaagaagcaacgccgtttttatctcagtttaattagctatctcatcttgttgggattattctttgtcctaattgggatgggaagcttggcaattacttacgtgctcaatgggcaccacgcttttggtcgaggacttagctggtgggattggctaggcgggaccttaatgttgacgagtattttacctgtttcagtaatgaccggtttgttctggcaacggcgaattttagtgaatcgccggatggccggtacgttgaccatcttgatggtggttctcggcagtttaggtgaagcgattgtcaattactggcatccctacctctatattctggggattttgccacccgtttcgaccatggcgcaactcttcaacacgttgggacacatttcgctagttgatattttattatcatgggcaatgagtcttggttatagcttggtcttattattgattgatcaattaattttaagaaggcgtaaattcctattttaagaagctgacaggctgctataagcggtttgacagcttctttttaagttgaattaagcggttacgggtgaaaaaatcttaaaaatgtggcatgattaaaaagaattcaaatcataaaaggagcttttataatctatgacaaaaattgcaatcgctggctcaggcgcaatgggcagtcgttttggttacatgttacaatcagctggaaatgatgttgtgttacttgataattgggcagaacacgttcaagcaatcaataccaatggcctgacggttgtagaagcggggcacgaacccgttcaggttcgaattccggctgctttgccaacggatattaaagaagttcaagacgtcattattttattcacaaaatcgatgcagctagtcgacatgttacaagccatcaaacccttaatcggtgctaagacaaaagtagtctgtttattgaacggtctcgggcatcccgaaacgattgaacaatacctgcccaaagaaaatatttttgtcggcattacactttggacggcggggttaacgggaccaggtgcgattacattaacaggctctgggaatgtcgaattacaaaatgttgatccagatggcaaagaatcggcacaagcattagttgccttgttgagtgcggctggcttaaatgcgcaatatagttcagatgtactcttttcaatctggcgtaaagcctgcgttaatgggacactgaacagcttgtgtgccttgttagactgtaatattgcacaattgggccaaaccccacaagcacaacaactcttgcgttcaattgtggcggaattctcagcggttgctgcaacagaagccgttgaattagacattcccacgacgattgcccacatcagcaagatgtttgcaccagaacaagcaggtggtcattatccttcaatgcaccaggatttagtgcaacatcaccgcttaaccgaagtggattacttaaatggttacgtggcacgcaaaggcgccgaaaagcacattgcgatcccagtcaaccaattaatcacggaattaattcatgccaaagaagcattattgattaaataaacgaggagtcttaactaatgacagaaaaacgccaattaaatatcgaagttgaatcaatgcactatcaaaaattattaattgctatcgatgatgatgacacaacctcatccaaacgggcctttaactatgcttgtacgcttgctaaggcctatcaaattccattagggattgtcagcattttggaaaccggcgatttgaacatttatcaatcactctcaccaaacgtggttgaagggcgccgagaagaaatcgcagccgatctagatgtttatgttcaaaaagcgaaagaattcggggttgaagatgtgacgccgattttaaatgaaggtaatccaggacacgtgattgttgaagaagtgattcctagtttccaaccagacttggtcatctgtggttcaaagacgaaaccatctaaacatttaatcgggacacatgcgagctatttagcgaaatacgcgccatgttcagtcacagttgtacggtaaattaagtatttggagatcagacgaatgatagaatgtacacaatgccatattaaatatgggcgtaaattgcaccaatgtcccaattgtggtctagtgcaccaatcaacgcaaacaaaacagcaaacatcgctcctgcaacaatactatcaatttttagcgcggagtttaaaacaaccgctaaaggtgcaatggcagtgggccaacctgtggtttggcttagtcacgtttggtctggttatattaatgaatactgcaacggcaagtttgctcattgccagttggtcagaacaaattggtgcggttgctggggtgatggcgtcacaaattgtcttgcgccaacggccaaacttattaccgcttgatatgaaggcactcggtggacaactatttattctggtggttgttttgggaatcggctttttactcaagcgttacttattgaagaagacgacaaccaccttgcgcgcgtatctaacggagattagtgcgtacagtgggataatcgtcattttagcattagctgcgctgttggctgctctatgtttcgggatgaccgccatctggttcgtcttaatcatggttgcagtgatgtacgtcagtttgaacattgcggttgggattagtttatttcaaactcgatgggcagcttttgatcgcgtctatgctattttattatttgaaatcttaacccatgttgtcttggcaattggcattagccaaatcgtgattttaaacctactaacaggactctaaaaaataaaagtgcgtattttggtacactttttcaaaagaggtttatcattagagttgtaaaaaagaaatgggaggtttttaatatggcagcagctgttgaaaaaacattggttttagatatgaagatgtcagaagcatttgattggagtgacgataacacaatcgtccgtgatgctttgtgggatcactatatggaagccaacggccggaacacggataaaaccgttgaggcaatgaaaccctatcttaagatgagcgacgcggaagttagagaaaaggcagaagcgcttttaaaataaggcaataaaaaaagacccgctaatcattgttgattagcgggtcttttttgggtaatcctcaaagccaacccgttcgactcagcactctaaacgtgcttcctgtcgcagtaatttccgcttaatctaaaaataacataaatcctaaaacctggatttatgttatttttgaattaatgctcaatgactaagcgcgacagtcagcactctaatcatacatatattctcttgtcattgggaggtctcttgcgctggggccttttgatacgaggtattgaatgacatcaatgttcccagattcaaacgatgaggcacatgcttggagatagagatcccacatgcggacaaattctggacctgcttttggtaaaatgacgtctttttgggcgttaaaattagcagtccagatttccagcgttttttgataatggcgccggaggggttccatgtcggcaatttgtagtccggcattgataatgtgttgtgtattttcaactaaaccgggtacatagccacctgggaaaatatacttattaatccaggcattgcgcgcaccgccttgttgacgggtaatcccatgaaggagggcaaccccatcatcagtgaggtagtcagcgatatcttggaagtaggcaccaagattttcttcaccaacgtgttcaaacatcccaacactggtaatgtaatcgaatggggcgtgtttgagttcgcgatagtcaacaagttggacgctagcaacatcgctaaggccctcgtcattaatccgttgttgaacgaaatcatattgttcctgactcaaggtaatcccgaccactttgagatgatattctttagcggcggttaacatgagggtgccccaaccacagccgatgtcgagcaatgttcggttaggttgtggattgagcttgcgtaaaatatggtgcactttattaatttgtgctgtctctaaatcatcagttggtttttcaaaataagcacatgagtaagtcattgttttatccaaccaaagttggtagaagtcattccctaaatcgtaatgactttggatatcttttttacttgccttttctgaatgcgattgttttggaatcagatgaatgtagcgactattacgcatgaaactgtctgcgctagtgtaagccgccgttaatagtttttgaagtggggtatctgttgtattacttgtcacttcaaggtcgccagccatgtacgcttcgccgagggctaatgatgcgttgctggacaattgtttgatgggaatcgcttttttaaaagtaatcgctacttcaggctctccagaaccataggtttcggagctgccgtcccaatagttgacggtaacagggaaatcaaaagagtgttgtagtagtttcttataaaaagttttttctaacataccgaaaatcctttctaggtgtaaatttgaagtaccagagtagtatacgactatttttaaaaagatgtaagttgcaactatcggaattccagaatatccaattagttcgaagtgttgtaaaataatgatatagaattgccataggaggaaattgcgtgagtttatatcaaaaatttgtgacgaatcagcagttaagacgagttgtagtgctcttaacgttgattggggtcatctatgtgtcacgctcgatgatgaatatcattttgctgacgttcatctttacttttttagtgactcaattagtacgaaaggtccaacagtattcaaaaattccgcccgcagctgtggttgtgccgctttatatgttggtgatttttttagtgtatctagcagtaacgatttatgtgccacagattgctaaacagtcaattaaattaggcgagagtgtctataatttctaccaaagtccatcatttgatgcgaatcaatttatgcgaaccattggggattacatgaaacagttcaacttgacggatcagttgaaacacggtgtatcaacaatcgttaattacatcaccggaatcggaacaatgggcgtcacaattgtcttatcgtttattttgagtttcttttacacaattgagctagaccgattaccgcagtttggaaaactctttttgaagagtacttacggctggttcttccaagatatcatgtattttgctaaaaaattcgtgaatacctttggcgtggtaattgaagcccaaatcttcattgcaattgtgaatacagtgttaacaacgattacgttaacggtaatgaaaatgcctaatattccgagtttagccatcatgattttcctattgtcgatggtaccggtcgcaggagtcatcgtttcatgtatcccattgtgcattatcgccttttcagtcggcggaattcagtatgtggtttatatattggtgatgattttagtcattcatgccctagaagcatatgttttgaatccgcgatttatgtcgagtaaaacacagctgccaattttctttacatttgttgttttatttgtagcagaacgtttcttaggaacttgggggttaattgttggattaccaatctttacgttctttttagatgtactaggtgtgaagaccattcaaaaatcgggaaaaaaacaaaaaaaagcggctaattgacgcggttagaatccgcaacaagggtggccaattggttaaggtcgatttgcaattcgacagcaacaataaataatgcttttagtgatggggcagcgcctttttcccaccggaagatcattgagctactaatcttggtattatattttgcgctgagtagatcggcgagctgttgcattgttagattcttagcagttcgcttatcgtgtaataattgtccgaacatttagcaccgtcctttatcacgcgtttgacttataagtttaattatatgacaaatgacgtcaataagtgaacacttgggactaaagtttttaattgacagagttcttacattatcgtaatattcctaatgtggaacgggattgataacgtttcttgggggtgctgaatgtggcagaaaaattatttgttctatcaggttatttaaagggtcatgatttgaaacagcaagttgttgctgatgtattgggcaaaacattaacgacggctaatcgtaagattagagggaagattccatttaccgtcaaagaaattcaattactacatgaccgcttgggaattccaatcgacgtgtttttttaagaatagttcctaatcaggaactaagtaatcagttttaaatgaaccaaataaaaataaccctgtcgactgaaaatcgtcgacagggttatttttattggctattttgctttaaggagttctaatttaccttgaacaatcatttcgcaaagatcaggataactgataccaagcacttctgcttcttgtggaattaatgaaagtggcgtcatcccaggtaatgtatttccttcgatcacgtgtaagccattttcaggactccagaagaagtcgatgcgggcgtagttcgttaagccaagtgcttgcatagcatcaagtgccatttgtttcatggcttcgtgcacatcatcaggtaaatcgtttggtggtgtgacaaattgagtggtatttccagtcacgaatttgtgctcaaagtcataccaaccgtcattaacgacgatttcaatggcaggtaatggttgaccattaatcacgccaagtgagaattcgcgacctttaatgaattcttcgattaaagcctcgcggtcgaaacgaagtgcatcttcgacagctggttgtaactcagcttcgttgtgcacgatatgcgtcccaacacttgagccaccgttacttggttttaccacgacagggtactcaaatgggatttctggcatgggttggtcgcgataagcagcgacaaaccgagcagttggaatttggttatataataagatttcctttgaaacctttttactcattgtaatacctgctgcgagtgtgtcactaccggtataaggaattccaaagagatcgagaaccgcttggactttaccgtcttcgccatcgccaccatgaagtgcgaggaagacaatatcagcagttttacaaatctctaagacattcgggccaaagagttgtgttgaaccatcagtacgtaatgcgttgatggcgtcgtctgttaaaacttcgtcgctgatgtcgtaatctttttcaacaggtgttgaagaataaagatcatcgattgatgcgacgtcgtgcaaatcatttcctaagaaaagatcaacgaaagcaacgtcatggcctttcgtttgtaatgcattggtaattttgtgtccagacgttaatgaaacgttacgttcggtactacgcccgcccgctaagacaacaattttcatatgaacctacctccgaatatttttggaaccttaagtatagcacaaaaccatattaggcgggtatcaaaaagctgaaaaatcagtggtctagtttaaaaattggcactcaacaacgtcgaatgctaattacttgcatttcatgattaacggactagaatagagttgtaaagattaagaaaggaagttttagagatggcaaacgaattaatgaatggtcgtcaaaattggctagataattttggtggagatgattggttcaagaatttcggtcagcaattattggcaatgtcgcctgaaacggacaacttactcaaaacagatgttaaagagaccgataaggattaccaattagcggttgatttaccaggactggacaagaaagatattcacgtggattatcaagataatacattgaagattagtgctaaacgtgatagtttcgctgatcatagtgacagtcaaggcaatatcgttcaaagcgaacggcattatgggcgctttagccggcaattctacctacctagtgtcaaccgggatcaaatcgatgcgcaatatcaagatggcgtcttacaattaatgttaccgaagttaagtgaatcagaccaaccaacgaacccaattgaaattcgttaattaaaaaagcggcaccaaccataaaatggttggtgccgctttttgagttatagaaaaagagaggcgtaaaacaatatgagacctgctacaagagtacaacatttaaatttggtgagtaaggcaatccgccgctgttgaatgggtgaatcgagtgggagtatgacgacttttaattcattttcaggatgcgcttgtagataggctttccaaaaagtatgctgtgcttgaaaagtcggcaacttaaggtagagaaacgcgataaaaatgaatgcactccccaaaagacggattgcaatgttcagggcatctagatagagcgctgttagacagccaccgattgataaaaagaataaaaggactaaccaagatgttaaaggaacagcttgcttgtaaaaggatgcgttgaaataagcttgtttcattgattgttgcactttgtaagcttggtcatccgtgtcaggatattggtccaagaaattttgcttgagtgttggctttagcatattgagacgcacgataaaataagatgaactgatagctaacaggcaaccaataacagtaagaaaaaaggcttgatttggggacaaaataatacctcctaattaataaataattgtagtatagcaaatatttttcaactattaagatttaatcagtaattttaatatttcattgagagataatgcgctttctaaatgaatacggtatagttaaggtaatgaaaagtagggggttggggacgtgctgactttatcacatttatccaaaagtttcggaacgatgctagcggtcgacgatgtttcatttacggttaagtcgggcgaaatattaggcttaattggtcaaaatggagctggaaagacaacgacctttcggatgatcttgaattttatggcaccagatacgggaactattctctggaaaggtcgcgcgtttaccgctgcggattatgaccaacttggctatttgccagaagaacgaggattatatctaaagatgaccgtggaacaacaaattttgtactttgcacagcttcgtgggcgcagcatcgcagacatcaaaccacagattgatgagtggttggtgcgcttcggggtgaaaggtaagcggactgataaaatcaaggatctttcaaagggaaatcaacaaaaagtgcagttgattgcgactttgatccatcaaccggaactcattattcttgatgaaccctttagtggactcgatccagtgaatgcagaactattagaagaaggtattttatggcttaaagaacaaggttcagcaatcattttttcgagtcatgatatgacgaatgttgcgcggattagtgaccgaattgtgatgttgcgcgatgggcaagtggtgctcgccggtacaatcgatgaaattcggaatcagtttggccgaacgcaattattcttagaagcaccgttagcacgcgaaactttagcaaatatcaacggtgtttcacgtgtaacacagcacgggcagcggtttgaattaactttggcagacgaaacggttggtaaaacgattttcgacttagcgacacaaaatggctatatcctagagtttagtcaacaagcaccaacgctcgatgaaatctttagaatgaaagtggaggaaggccatgtttaagtttaaggtgatttttaaacaagtatttctaaagaatattaaaagtccagcgtatctaatcatgattttaatgccaattgtgatgttcgggattacgtttggtgtgagtcacttgatggatcatagcaaagaacccgttagaattgctgttttggcgccgcaaccagcagaacagagtgaattacagcagttaaaaggtaaaatatatcaaatcaatcagcagattacgactcgggaacaagccaccaaagcgctccagaaagagcgaattgatggctatttgttgttgagtgaggaaaaaggacagacaatcagtcgctactatgaacgaaaagatagtccatcatttgatgcgagtgtcttagagaatcagttaaatcagattcatttagtagctttggcgcaacaagcaggcgttgcacctgaacagatccagaaattgatgacgccaactgtcattgcaccagtgacggttaattaccagaatagtcatgaaaagatttcccaggaaaacactaaagaagtgggccaaattatttcaattggaattacggtcttaatgttcatctttatcgtgaattatgctggaatgattgcccaagaaattgcgactgaaaaagggtcgcgaatcatggaaatcattctatcaagtgtttcgattgaaattcaatttttcgcgaagattgccgcgatattagccctattactcacccaaattactgtctatattttagttgggattgtcgggtttcagtttttgaaacagcaactaccgttagcagagttattgccgattattcgtcgtgctttggttgcgccagcaatgtggtatgcaggagtctttttaattattggggtattactctacaccgtattagctgcaatgttaggcgctgttgtgtctcgaatggatcaggtacaacaagccatttcgccattgattttactgggcacattaagttatttgggtggctttttactggcatcacagaccgatattccattattgcgggcggtgagctatgtgccattgttttcacagattatgttacctgtgcggctggcaaacggtgatgttggcgcgttcggggctagcatgggactcttcatagccatggcgacactaattggactgacttatttagcattaattatctatcgcatgaatattttagtttattcggataaaggtgtttttaaagcattaattgccacctatcagcaactcaaagaatcgcgccagtagaagatttttacaaccaattaaagcggattcatggtatgatagagccatgtgattttagtagcaaggagagcgattgaacgatgcaaaaacgatgggtaaaattcggattggcactcttaggggtgacactggtattggcaggctgtcaaagtaagccagcggacaaagaaacgttggtcaaaaagccctatgaaaaaagtgattactatctcggaacgatttgtacattgcgaatctataataaagacaaggaagccgtgctagataaggcttttgcgcggattaaaaagtccgaaaatcaagcaacgttaaccaaatcaggttccgaattggataagattaatgataatgccggtgttaaatctgtacaggttagcaaagatatgtggccactaatggaaaaagcgttacattatagtcaagaatcggatggcgcgtttgatatggccattggtgcaatcacagatttatggcaaattgggttaccaggcgcgcgggtgccagcacaagcagaaattgaccaagcgttaccattagtcgattatcatgacgttgttttgaataaggccaaacgtacagtttaccttaagaaaaaaggcatgcgacttgattttggcgggattgctaaggggtacattgccgatcaagttaaacaagtttttaaggaaaatggtgtgacatcagccgttattgatttaggtgggaatgtgattgttatggggcattcaccattagggaagaacaaaccatggacggtcggcattcaagatccgaaaaaggcgcgtggagaatcagtcggtacgattaaaggccgtgatatttcggttgttacggcagggatttatgaacattatctaaaaaaagacgggcatacttacatttatctctttgatcgccatactggctacccatatgaaaataacctagcgagtgtcacaattatctcgcctaaatcagtagatggagatgccctttcaaatgctgtctttaataaggggattgtcgaaggcatgcagctcatcaacaacaaaccgaagaatatccaagccatcatgatcacaaaagataataaaatctatctatcaaacggtttgaagaagacgtttaaacttaaccaagattcaaattatcaagttgaaaaacaattaccaacgaaatagccgctaaattgcggcttttttgcaattatggggtcaaagcattaacggaaaaagtggcaaaatgttaaaattgggaaagaatctgcttttgaggaggacaatgatgacaaacgtgcgaatgcaagatgatttttatacggcggtgaatcaagaatggttaaaaacggctgaaattccagcggataaaccagcaacaggcggctttgtcgccttggttgatgagattgatcagcaattaatggctgattttgctaagatgtcgaccgcaaagaacgcattgttacaacattttctagattattacgaactagctgcggactttcaaacgcgggatgcactcggtatgaaaccgatcctaccaatggtagcccgggtgcaatctctcgatagtttagcaacttacaatcgtgggttagctgattgggtactttccgggttaccaacaccatttggcttatctgtcgatgctgacatgaaagacacagcccatcacgcgttgtatgcggaagctagcgacttaattttgccagataagacctattatgaagctgacaatcccaatgctgaccatttattggccgtctttacggatatgatggttcagctcttgcagaaaattgggattgcgcccgttgatgcaacgaagacggtcaaattagcgttggcatttgatcggtcactggcaccttatgtgaagagtgccgaagaagcagcggattacacgaaactctataatccacagcctttgagtgattttatgcaacaacaaacgacgcttgattttccacgtttatttagcaaggtgctacctgttcaaccggaaaaaattatcgtgacggaaccgaagtattttgcgcaactgagtcagcttgtgacagacgccaatttcgaaacgttcaaagcgtggctgttagtcatgacagttcgtagttggagcggttatctgaatgaagaggcacgccaaattagttcgctctatagtcgtgcgttatctggtagcaaggaagctcgtccacaacaaaagagtgcttactaccttgccttagggatgttcaatcaagttgttggcgattattacggtcggcaatacttcggtgaagcagccaaggccgacgtccaaaagatggtccaaaaaatgattggtgtttatcaaaaacgccttgaaaaaaatgactggctaaccgaaaaaacacgccaacaagcgattgtaaaactcaaccaccttgggattcatgtcggttacccggatcagattgcccctatttttgcgaagttggtcacagtacctaaagcagaagatgggacattatttgaaaatacagctgactttattcgaacgattgaaacggaaaattttgcgaaacttactcaaccggtggatcgtaataagtgggaaatgggcgctgccacagttaatgcctattattcaccttcgaagaatatcattgtctttcccgcggctattttgcaagcacctttttacagtttagaacaaagtagcagtgctaactacggtgggattggtgcagtgattgcacatgaaatctcacatgcttttgataataacggtgcgcaattcgacgagtatggcaacatgcataattggtggcaagaatcagatttagctcacttcaagacactttcggaagaaatgattgcagaatttgatggcctagaatatgcaggcgcaacagttaacgggaaattaactgtctcggaaaacattgccgatgcgggtggcttgagttgtgcccttgaagcagccaaagaagaacctgatgttgatttggcagccttctttgtcaattgggcaacgatttggcggatgaaagctacaaagcaatatcaacaattattgttaaatattgatgttcatgcaccaaacgcgttgcgggccaatattcaggtccaaaacttggcagccttttacgagacatttaatgtaacgaaagctgatcagatgtacttagcacccgctaaacgggttgcaatttggtaaattaaaaaggtgcgccacaattgtgacgcacctattttagtagtgatgggggataaagaaatgtcagaaaaaaaacgcatgattaatggtcaaatttatcgggcgaacgattcagaattgcgagccgatatgaaacacgcgcgcgtacttactcggttgtttaatcaaaccactgaagaacaacaagattaccgacgcgaattaaccaagtctttatttgcgaaaagtggctcagatttatatattgagccaccatttagaactgattatggttgccaaacacgcattggtgagcatgtgtatatgaattacgattgcatcattattgatgtagcaccagtgacgattgggaaccacgttttctttggacctcgtgtaggactctacacagctggtcacccaacgacggcacaagaacgccgggatgatttggaatatggtaagccaatcaccatcggggatgatgtgtggattggtggcaatacggttgttaatccaggcgtgacaattgggaacaatgtggtgattggttctggatcagttgtgactaaagacattcctgataacgtgattgcagttggtaatccatgtcgggtactccggccgattgatgaggcagaagaggcctactgggcgcagcaaaaagcaagttattttgaagcccttgctaatgaataagtttaccgagtagtgttaaatggagtagtcatcactaacaaagcactaagctaaatatcagcaaattaccaagaaaaagccgctagtactctataaaaagggttctagcggcttttttaaatgtttggtggatcaaactggcagcaaatactattcagaatgggtcaaaccgtaataagggttaattacgattggttttcatcagtactgcggtgccatggcttttgtaatgcttggacggcttgagcgatatctgtggcgtgggtgattgctgagataacggcaactccatccacggtagtctttgcgacttgagcaacgttttcttggttgataccaccaatcgcaacaaccggtagttcactttgctgcgttaagaaacgcaagcgattagtgccaagtgctggtttagcatcttctttggaattggttggaaaaattggaccaatgccaatgtaatcaagtatcggttgattatgactttggtgaagttcttgttcagtgtggcaagatagaccagttattaagccgtgtgctttggccgtttcaattttatgccacgggtgatcgctttggccgacatgaataccatctgcattgatttgaagtgctaaatcgagattgtcatcgataataaatgggacttgataatggcggcaaagggcttgagccgctgtcgcatactttaaaatcgcatcggaatcttgcagactaccagcacctttttcacggaattggaaacaggtaatgccggcttgtagtgcttgttcgagaatgtttagaaaatcatccataccggtattttgggtacccgctaccaaataagtttggaacatttcccgggaaatgttagtcatgatgaacctcctgataagcccagtgattggttggtccgtggccgtgaccaacagcaatcggattagcaattgcggcttggataaaggctttgctaatatgaattgctgctttcaaaggggtgcccttagctagctcggcggttaaacaagctgaaaacgtatctccagtgccatgtgttcgtttagtagcaattcgtggtgtagttaaccattcatcttgtccatcagcgtagaggacgtaatcggcggcttgtgattgatagtctaaatggcccctttgataatgatattcttggcgcccatttgttggagttggtgggccgcttgtttgaaatcagctgttgtctttatgcggctgcccgtgagaacttcggtttcgggtaagttgggtgtcagcactgtggctagcggcaataattcagtacgtagggtatcgatggcatcgtcggcaagtagctgtgcaccgcccttggcaatcattacaggatcaagggtgagcggcccccaatcataatggcgtagatttccagcgaccgttgcaacatgttcagcatctgccaacattcccgttttgcaggcacgaattttaaagtcagtagccaatgaagcgaattgttgattgattagtgatagtggtagtggcagactggcttgaacgccaagcgtattctgagcggtgattgcgacaactacattggttgcaaaaacatggcgctcttggatagttttaatatcagcttgcataccagcaccaccaccgctgtcagaaccgacgatggttagagcttgtgggaattcattcatgagtaggcacctcacttagttggacggtatttgctactttggctggggtaatgtggaataaataatcgattaattggggatagaaggtcccaggtagcggtgtttccattgctgtggctactagttcgccggcaacggcaaatgtggcggctgcttcgatagcggcttggtagggatctgcaggatgaactgcaacaaatgcaccacagagacccgataacatatcacctgaaccaacatgtgtttgaaaaagtgaggtaccatttgaaatcagcgtaacgcgttgaccgtctgtaataatgtcggtcggacccgttaataaaattatggtgtgtaaacgattggccgcggccttagcaataatgactggatcgctatttccatgcccggcgtcgatgccatttgcttgccaatctatcccagcaaaataagcaatttcacctgcattaccacgaatgagagttggtgtgtcaagtattaatagttgctcgataatttgctggcggtaggccagtgagccaactgccactggatcaagaacaacgggtttttgttgttgataagcggcggtcattagggccatcatttcttgaatctgtggtgcccacaaactaccaatattaatcgtaatggcttgtgcgatggtaacaattccttccgcttcttctggtgcattagacataattggtgaggcaccgattgcattttgtgcgttggcgacctgatcaattgtgacgccatttgcgacattagcaacgattggattgagcgctctaactttttctaacagtgaaacaaccatataaaaacctcccttaaaaactaaaaaaaccacttaacgatgcacgaatgcatagaaaagtggtgtgagtagtctaaagaaaggcactttcctacgcaagtctgaacttacaggttcaaagggatcaggctgtacaaacctatctcagttcttctaagaacacccctagtgcaaagcgattaatttgtaccctcagtatagagagtgtggtaggtgaatgcaaccgttttatttggtgaatcagatatcatttgttaacttttaggtatagaccaatattttttgtgtgcatgaaaccgcttcaaccgctatttataaaggtctataccggttgttaagcgcttgcttatcgtttacattaatgatttaatcatattaacgaaaaaaatgaatggagaaaaacttatgaagaattacttacaacgaatgggtcgttcattaatgttgccagttgctgttttaccagcagccgcaattttaatggggattgcgaactgggttggcaatggcgattcaaacgcaaacgtctttacaattttcttatcagccggtggcggtgcaattttaaataacttgccattattattcgccgttggtttagcactcgggatgtctaaggatcaagatggtgcagctgcacttgctggtttagtcgctttcttagtgcctaagacaatcttggcacctgcttcaattcaagcgatgcaaggtttatcagacatcgctaaagtaaacccagcttttggtaagattgaagggaatgttttaatcgggattattgccggcttaattgcggctgcaatgtataatcgcttccacaacgtgaagttgccaatggccctctcattctttagtgggaaacgtttagtgccaattatggcggcaactgcaatgatggttgtttcagctatcttgtactttgtttggccagccgtctttacagtattagtgtcatttggtgaagcaatttctaaattgggttggtttggtgccggtctatacggctttttcaaccgtttattaattccaaccggattacaccatgccttgaactctgtgttctggtttgatgttgctaacattaatgatatcgggaatttcttgggtggtgcgaaatcacttgcgaatggttcagctgtgattggtaagacagggatgtatcaagctggtttcttcccagtcatgatgttcggcttacctgctggggcttacgcaatctacaaaaatgctcgtccagaacgccgtaaagcaacagcttcattgatgttagctgctggttttgcgtcattctttacaggggtgacagaaccacttgaattctcattcatgtttgttgcatggccactttatgtattgcatgcagctttcacagggatttcattggctgttgctgctttcttccactggacagccggtttcgcatttagtgctggattagtcgattatgttttaagtttgaaaaacccagttgctaaccaaccgttgatgttattggttgaagggttggtcatggcagttatttactactttgggttcaactttgccatcaagaagtttaacttgatgacaccaggtcgtgaagcagaagatgctgttgatgaagatactgctggcgttgaaacagacgctactgatgataaattcatggttcaagcaaaacggatctacgctgcaatcggtggcaaagacaatatcaaagtgattgacaactgtacaacacgtcttcgattacaattagaagacactgccaatgttaaccaatcagcgattaaagctgttggtactgctgggattaacgttttagataaaacaaacattcaaattattattgggacagaagtccaatttgttgctgatgctttaaaagaactttataaccacaatacgccaatcgcaacaagtacaccagaacaagctgccgcaccagttgaagcacctgttgatagcgatattaactcaggtgaaacagatgttttctatgcagttgctaatggtgaattgatcgatattgaaaatgttgatgatccaacttttgctcaaaaaatgctcggtgatggctacgctgtcattccaacagacggcaaaattgttgcaccagttgatgggactgttatgactgtgttcccaacgaaacatgcaatcgggattaaaacaacgaacggtttagaagtcttagtgcacatgggaattgatacggttgaattaaacggcgcaccttttgcagtcgctgttgaagaaggccaaacaatcaaacatggcgacttattagcaacggttgatttgaatcaaattactgctgctggtaagaagacggcaatgatggtgatcattaccaacatgcccgctgttgattacattaagtttaacgcaatgagtaccacagttgctgcagatgcagttgccttaaaagcaacaacgaaataatgaataaataaaaagccccgcaaacttcagtttgcggggcttttttgtgttatttagttaaataatcctttgaagaaattagccatgctatcaaagagtttttgaatgaagttccgattgctttgggtgttgagcttattgaagatgtttttcgcaccactttggatattattcattaacttaccggcttgattcttgaaatcatccgaatttaaagcaccggaatcttggattttaacgagaacattaatgatttgttgtttttgattattgttgatgatgttggtgaggttgttttgttcgagttgattattgacgatggtagtaatttggttaacagtcagattattgcccttacttgccatgtcttttttggcacctgtgacggcattattcaattgggaatctgaataaccatcggtgcctttattagcctgtgtgatatcgctgagggtgctcatttcgtcttgagcagcagttacttgcgcttggttgagtgaatcgccattttcagcgaaagcggcgtaaacaccagctaaggcgccagagccatcgattggaatggcggaagtcacgtaaattgtcgcattcgtgacgccggcggttaaggccgcatttttatattggttggctgtaattgtggtgatgttgttacggccattaaaatcgataattttaacattgatgccggtattgctgtcatttttttgaattaaagcacttgagtagacacttgagttggcgttaaatgtttgttgattttgatcaagatattttacaagtgtggaaccggtcactgttagttcactgacatctgtgacattcgcggcattttccagtgtcttgagggtatcagctttttgggtgctagaaaggctggtcccaagagtggcaacgggtttgtcccacgatgtggtgctgtcggcaaaggccggttgtgcgctcagaccgataatagcagtaaatgcaatggggatgaggaacttcaatttattaaacataagcaataatcctttctcaaagcgaatgatacctttagtatagccaattcaagccgtaaagtatccgattttaactatttttaggaattagagatgattttaaggcttttttaaggttgctgagtggggtgaatgctactaatgacccgtgtatgggttagtttctcgtagaataattgtggtcgtttagtcacccaacttaataagaagttaccggtgaataacagtggtggtaagagtgagagaccgataataaagagatagacgtcaaaatgttgttggccactagcaacagcggcatccagggtgacgcgccagagttgaaaactgggaatgacgatgaaaaataggagtagctggcgccagaagatcgcccaacgaggatgatggtcagcgacaatctgtagttgcaggagagattgaccaggtgttttgccacgccaaaaaacggggagcattaagaagtaagcaccagttgtcaggcagtactgaagcatttctgaatgaatggtgggtagttttagtaatcgccagataacagcaattgcaaatgtaatgatgcctaacacacagtaatcaacggcaagtgccaataagcgccggaagtagcccactttttgaccgcgcgcataggctgcttgatccaaactttcacgagtgggtaagaaaaaggtgaccaagggctggagataaaatccaagcagcccgccagagatgttgagcaataagtcatcaacatcaaataaccgataagggcgaggataaataccatacagtccggaaagttgcgtgagttcaaagaatagggataacgtaaaactaagtaataagggctgtttgaaagacgttttaaagaagtaacgtaaataaatgccaaatggaacggttaaaaagatgttaaacaacggctgaatggttgccgcttgtttaagtgttgcgaggtatgaactcggttcggtccaaacgaaatgggttgagttgataaactcccggacaaacgtaaagggaactaagttatagcgcggggtggttaaatgagcgaccaccgagcgtggggggaggggaagaataattaagcagtaagcggctaccaagtagaacatgaagctgtagagaattacactacgcaggatggttagcgaaccataacgatgatagtggtaaactaacagtggaacggttaagatgattgcgacgaatggaaaggcaattgccgcagtaatgatattgctgacgtaacccatgatgagctcctttggtgttagatgtggttatattgtatttttttaatgaacgcctgtcaaaatagggatcattgttcgttatttacgttcgtattttatcggttatatgtatcgttaagattttactgaataaaggctgattagagattttaaagttcgtcttttatattgattttgagataatttgttgctacaatagtttttgtgagttttagggtttaaatagcggatctgaagacggattcgaatagaggagtatgtttatatgacatctgtagtagttgttggaacacagtggggcgatgaaggtaaaggcaagattaccgactttttaggtcaaaatgctgatgctatcgcgcgttatcaaggtggcgacaatgcaggtcataccattcagttgggtgacacaacttaccatttacaattaattccatctgggatttttaacagtgacaaactcagcgtgattggcaacggggtcgttgtaaatccgaagaccctcgtttctgaattgaaatatttaacggatcaagggatcaacgtgagtcaattaagagtatcagatcgggcacacgttatcttgccataccattctaaattggatggcttacaagaagcagccaagggtgatcaaaagattgggacgactaatcgtgggattggcccagcttatatggataaagccgctcggagtgggattcggattgccgatttattggacaaggaactctttgcaactaaattaaaacaaaacttagacgaaaaaaatgcgctctttactaaaatctacggtgctgaaccacttgaatatgagacaatgtttgcagaatattatcaatatggtcaagaaattaaacaatatgtttgtgatacttcagttgttttgaatgatgttttggatcaaaaggggaatgtcttatttgaaggcgcacaaggcatcctcttggatatcgaccaaggtacgtatccatttgtgacatcatcaaaccctgccggcggcgtttcaacaggttcaggagttggtgcttcacggattgacgaagtggttggggtggctaaggcttatacctcacgcgttggtgatggcccattcccaactcagttagatgatgaaactggcgacttcattcgtgaagccggtcatgaatatggtactgttactggtcgcccaagacgcgttggctggttcgactcagttgtgcttcggcattcaaaacgagtggcgggtgtgacccaattatcattaaactgtgtggatgtcctaactgggattaaaacattgaagatctgtgtcgcttacgaattagatggcgaacaaatcgatcgttatccagcaagtctccgcgaattagaacgttgcacaccgatttatgaagaattacctggttgggatgaagatatcacgggtgctaagacgctagaagacttgccagctaatgcgcggcactatgttgaacgaattcaagaattagttgatttaccattagcaacatttgctgttggtccagatcgtgaacaaacaaatgtcttatctgctatctggtaggtattgctgaaaaagagtacaaaaaaagagaatgcaaagttcgttttctaaacgtgtcgttaaacacgccaacaaactttcattctcatgggtttggcaccagtcagtattatacacacattaccactaaaaagatagtgggaaaattagttggtttagaggagtcgttatggaaagagtaagtcgtttcttcgggattgaagaacaacattcaacagtgcaacgggaaatcctagcaggattcaccacatttatttcaatggtttatattttattcgttaacccgagcgttttaggtgattcagggatggataaaggggctgtttttgcagccacagcattagcaagtgcgatcgggtgtttcttgatggggttatatgctaaatacccaattgcaaccgcaccagctttagggattaatgcctttttcagttattcagtggttatcgggatgggtgtgtcatggcagacggccttagcgggtgtatttgtggcttcattaatcttcatgttgattactgtctttaagctacgggaaatcattattgatgccattccgcggaatatgaaactagcgatttcagctgggattgggatgtttgtggctttcatcggtttacacggtggtggcttgattgttgcgaacaaatcaaccgttgttggtttgggggacttctcgcaagggacgacttggttaactgttttcggcttaatcattaccgttattttaatggtccgtaaagtaccaggagcaatctttatcgggatgcttctaacctcaattgtgggagccatcagtggcctaattaagttgccaacacactttgttgcagctgcgccaagtttgaaacccactttcttagctggtttaaatcacattggcgatatcaacaccgttcaaatgtgggtcgttgtactcactttcttattagtgaccttctttgataccgccgggacattggtcggtttagctgaacaagccggcttcatgaaagataacaagatgcctcgcgttgggaaagctttggtatcagattcaacggccatgttagctgggtcattactcggaacatcaccagttggggcctttgtcgaatcgtccgctgggattgctgttggtggtcgaactggtttaacggccgttgtgacgggtgtgttattcgtcttcagtttattcttctcaccattattgacggttgtcacgtcacaagtgacggcccccgcattagtgattgtcggtgttttaatggctcaatcattgaagaaaattgactgggaaaaattagaaattgcaattcctgccttcttaatcgttctaggcatgccactgacttacagtatttctgacgggattgcattgggctttatcgtctatccaatcacaatgattacagctggtcgtcgcaaagaaattcatccaattatgtatgttttattctttgttttcgtggtctttatgtacatcttaaacgtaaaataaacaacaaacgcacagccgaaagtttcggttgtgcgtttttatgtgttgctgttattaattgcgaatcacaaggatttagagccggtaaatataaaatagtgtgttacaatagtcgtaaatactagtgaagggtttaaactgttatgcaaaaaaagacaagaaaccgattaattaatggcttattagccattctgttagtggttggattagtgttggtcttcatcaatccaatccgcaaccaactggttaaaatgatggcgcatcgtcagatggacgtcacagctgctcaaattaagaaaaaccaacataaaaaagcgagctttgattttgataaggttgattcactcgatacaaaacagattgtgaatgccgctattaaaggcgatgtgattgtcttaggaaaagttgcaattccaagtgtcaagatggccttgccagtcatgaaaggcgtctcagaggacacaatggctcaaggtggaggcacaatgaaacctgatcagcaaatgggtgcagttaacaattatgctttagcagggcattctttccaaaacatctttctgccacttgaaaatgtgcgcgtcagcgataaggtctacttaacggatatggaaaaagtctacacgtacaaagttgattacaaagcttcaatcagtccatacgacgtaaaagtcatcgatgatgtaccaggtcgtaaaatggtgacattgattacctgtgataaaacggtccgcagatggtgtattcaaggtgaactcgtgaagacccaaaaggcaacaaagaaaatgttagctgttttcgggaattaacccgggaaataaaagactgccagtgagttgaaatgctttaatatcagggatgcaacagatttgttgcttgtttttgtgggggttaattcgttaaattaggtttatagcggaggtggcaaaatgtcagttgggaatgctttaaaggaagctaggatgaatgttggggtgacgcaggaacaagttgcacagaaattgtttgttacacgtcaaatggtttctagatgggagcaagataaaacattaccaaacgttcatgttttaaaaacacttagtgtgctttatggtattccaattgatttcatgtctggcattattcattattgggcttgtgctttatccagtcgctaagaagatatcaggaatggttgttagctttggtaaacaatatgttaaatataatcaaaaggctctatacgcataaacataaaaacgtcatctattggatgacgttttttatttgaaaatcattggaatgaggccacctactaagaatagaataatcaatacccaaatgacttttccgagtgggtgattctggttaatcgttaagccgaccccaattggcttagggataattaagggctgtttagcatgcggtataattggataaaattggcgtgttttgaagtaactgaagccaatcaaaacaaccgcaacgcttaaagttaatagcccagacattgattcggttaagactgcagggaaaaaggcgtggacgattaaaatcacaagtaatgtccctaatgagagtcctaatccccaatcaacaacgtgggattgtttgatttgtttaatcagttgatagtcatcagagacttgttggacataatcatcgtcagccttgagcatgtcgtcaattgttagagaataaagttcactgatggcaattaacatggggacatccggatagttcttaccggtttcccaattggaaattgtttgccgcgtggtgtgcaattggtcagcaacggcttgttgggttaagttcagtgccagtcggcgttcttttaaaatggtagcaagcataatggttaaacctccctaaatgattagctctagcataacggtagattgtcagaatgaaaagcaagtggtgcttgcaaagcaggaaatagctagttttaaacgtggggcacttatttggtgcgcgttattttgttaattgtaagctatgatgcaattattgaggaggtggcaaagtgagttttgcagcagaattaaagaggaatcgattagcgcaacatctgtcacaacaagacttggccgatcaattatttatttcaaggcagactgtttccaaatgggaaaatgaagtgagttatccagatatcgataaattaatggctatcagtagtttgtttggcgtaagcattgattatctactaggcaatgattcgaaattgaaggagagtgtgttaatgaaaaataaaatttatcgggtactcaaaaccagtttgaaatatgttggtgcgattggcatcttcgttttagtttttttgggcgttaatgcatggttgaaccgaccaactgaaatgcaattatcagatttaaagattaacaatactttttttgaaaagaaggccgggcaccttgttttaaatgtatatggtgaattgaagccgacctctgccagttcgtcaggtggcatcttcggacctttagagagtaaagaaggaacttataatctctctaatgggaagcaaaatatccagatttatggggagaagacgcggagtccttttggtaataaaacagtcgcatttgagatcccagaggatgcctatcatgagattaatctgatggaaaaggatatctacttagctgatcgaaaaggcggcaaggtaaagctgtacgatcatcggacacagacgcagccgtatagtcatgatcaaaagaatagtaagcagatattaaagttgatgaaacaatataaggatgttggctacgggggagaacttaaagagtagtctagaaatcatacatcattgatggatggttttttaagttaaaaataaaaaaagtgataataaaaacgcaattgcgtttttattatcacttatcatgtatacttgatgggtggtcaggggtttgagcctgttccacgttaaaatgccagtataccagtagttataggggttttattacatagtttttatgatgtgaatacgtctttgaatacggtttgttagaaatctaagaaattaaccagcttttggacggcctctttattttggctattagtaacatgagtataaatattgagagtcgtttgggcgtcctcgtgacctagtctttcttgaacctctttgatggatgtgccagcagagaataaagccgatgcgtgagtgtgcctaaagccgtgaactgttatctttggtaggctagtaccatctgttagccgtctaagccatttagagggcgtgtttagtgatttaaaggtattcttagttgttgcaaagattagctggctaggttgggatgtgttaaagcccagcatgaaatatatccgcttttggtccatctgccatttacgtaaatagaatagggtttgtttatcaagtgagattagtcggttacctttcttggtcttagtcgcttggataatctgtttaccgccagcaccttgagttaacgttttgttaatactcaaggtgcctttttgtgtgtctaagtcatcccaagttagggctaagcactcgccacacctaacaccagtaaaggctaatactcgaaataacgtgtattgttccaagtgttcattaggatccatattagggaataggagcataatatcatgacaaaaaacgtattagttaccggcggcaacggttatctgggtctgcacattatcttacaacttttaaatcaaggttatcacgtccgtgccaccttacgccaactcgacaaacaaaccaccgtccgcaccgccctaaaagaaaatcaggcgcaacaccgcgaaaatttaagttttttcgccgctgatctcactcaagatgctggctgggcgacagccatgcagaacatcgactacgtgctaagtgtagcatcacccgttttttccaatgacccgaacagcgacacaactgccaccgagggtattttacgcattttaaaggccgcccaacaggcccacgtcaagcgtgttgtcatgaccgccaactttggcgccatcggcttcagtaatcacgaccaaacgagcatcaccactgaagccgattggactgatcctaacgaaaaaggcttatcggcctatgaaaaattcaaactgatcgccgaacaggctgtctggcagtttattgaacaaagtcacggcagtttagaactgactacgatcaatccggtggcgattatgggcccagcattagacgcccacgtttctggcagcttcgatcttttgaaaaatttacttaacggtcgtcccaaaatgattcccaatatcccactcaatctgatcgatgtgcgcgatgttgctgacttatacattcgtgcgctgaccgcacctcacgctggcgggcaacgttttctggctagtgctgctggtcagatatcactaccagagatagcagcactgattcgccaaaaacgaccgcaaattgcccaaaacattcccactaaaacgatgccgaacttgcttttaagcagcgctgctttgttcaaccagaccgcccgcgaaggcaatttattagtgcacgtcaatcgtcagttgagtacctaaaaagcgcaagatatcctaaaatggcagccacattttgataatacgaccatcgtattagatagcattgacacgttaattcaatatggactactgccttaaattataaatttatttttatcacccccttgacaaacacttaaaatcgcgttaaattatagccacatgataaatcaatgagaaaattaaacgctgtgataagaaaagtataattgtattcaccagttaagcgagcgtcgtttggtgcaaggacgtcaaggtgcgacaattagaaaatcatctttgagcgatggatgcgaagtttgagcgttcattgggggctcccattatcgagctagggtatttcgtaccaatcggtgcttgtacccgaagaggctgttttcgtgagaaaatggcaaatcaaggtggtaacacgtttattaacgtccttatctgaaattaatttttcaggtttggacgttttttgtttatcgtgatcattcccgcgcaggatgatcgccgccattactaaagtcgacttagcaatggcaacactcatgatttaaacgtggggcaacagacgcttagtctttgaaccacatttccacaaacctacaaaatttaaggagtgctgcttatgttagaggaacgtaaactcactaaacgcgattatttcgtggttagttcaatgctttttggtctattctttggtgctggtaacttgatttttccattacatttaggccagttagcgggacagaattgggtgcctgccgcgcttggcttcttagtcactggtgtgttattaccattattatccgttttagcaatcagtatcactcgttccgaaggtgtctatgatgttgggcggcctttaggtcccgtattcgcgctcttattcatgatcttgatccacggcaccatcggcccactttttggtacaccacggacagccaccgtttcctacacggttggcttagcgccactagtaccaaagaatttccaaacagttggtttattagttttctccgctgttttcttcggcttagccctctttttctcattagaggaaaataaaatcgtcaacaatatcggtaagttattaaatccagttttcttagtcttattagctggcgttttcttcttagcttttagttcaccaatgggccacgccggtgttcaacacgccaccgctgcttatacatcaggctctttcgtcaatggtttcttgcaaggttataacacgatggacgccctagctggcttagccttcggggtcaccgtagttaccgccgttcgcaccttaggcaaaaaacgcgctaacagtgttgcgctggtcactgcccgtgccggcgtcttcgcaatggcaatgatcgccgtcatctacgttggtttgatcttcgttggcgcgatgtccttaggtaaattcaaagtttccgctaatggcggcatcgcttttgaccaaattgtcaatcattatatgggcgtcgctggtcaggccatcttagccactttgatcaccgtcacttgcttaaccacggcgatcggtttagttgcggcttttgcccaagactttcataaacattttcccaaagttagctaccgcacttggttagttctaactactctggcatcattcttgaccgctaatatcggtttaaatcaaatcatcgcttggtcaacgccaatgttgatgttcttatacccactatcaatggtcttgattttattgtcagtcgcttcaccactgttccacaaagacccagtcgtgtataaattcgttgttctctttaccgttgttcctgcttttttcgacatggtaactgcttttccagcggtcgtcagccaaagtagcttcggtaaagcgatgactggcttcgaacaggcatacttgccattcgccaactacggcttagcttggttagtccctgccttagtcggtgccgttttaggggttgccgtccacgtcttcaaacgtgttagcgcccgcaacaccgtttcacaaactaaataggtaagtcaaaaaaacgttcacttgcggtgaacgttttttattgccttgaatttatactttaagtgcaacaaaagagactcatgatatgaatccctgtaaaatggtgtttgcgaagacaaccatcgaagggagcacataatcatgagcccatacaaacatcttaccatgagtgaacgcgaaacgatattcctgatgcataataatcaggcttcactgacttcaattgcccaaacaattggtcgagcaacgtcgacagttagccgtgagttatcgcgaaatagatcggcatattcaccttctgttgctcaagagcgctacgaagctcaaaaatctcattgtggacgccggtcgctactttctgatcaccaattgcttcaattaatccggcatttattcttggatctacaatggtcaccagaagaaattgccgcacgcttaaaattagagacctcatcatttcagatcagctacaccacgatttatcgtggcatctactccggtttatttgatcagaagctttcatcacgaggtgccagaggggtgatcagaaagcttagacatcatggtaaatcgcgccataaaaaaggttatgaggaacgtcgcgggaagattcctatatcgcatacactccaagaacgacctgagtctgccaataagcggactcagattggccactgggagctggatactgtagctggcaaaactggcagatcttgtgtggtcacaatggttgaccgttgttcaagatacttaataatgcacaaagcagctaagaaaaactcagccagtgtgaccactactattcgaagactactaaaagatctgccaccagaacacttgggtacgattacgcccgaccgtggcaaggaattcgctaaacatcatcaactaactgaagaatttgggattgatatttagaggtgatatgatggtcaaaattattattacggatcaacagcaaagcaaagaatatcagttaccaagttatgggagcttaactgttacaactcaaaataataaggtggtgttcattgaacgaacagacaagactaaattagtttaatacctgattggaaaaccaaagggatgcgttactgctagtacatggcaatagtgcatccctttttaatatgttggaggtgtcagagtgtttctttttgatattgatgaggataagagcagacagcaagcagatagattattaaagcgatattggtgagtgaaacatattgcaggtagtgccagtcatttaaagagtcctatttgtgatcatgcgccaaagtcttttagcagtgataatacaaccgagaaacgggcggttaaaacactcgaggcacggcagaccctagaatacatagacgtggctttaagtaagctaacggtaattaacagggaattgctaaagatgcagtatttaagtgctggtaaattaaccatggcttatatctgcggtgaactaggtataacagcatcatcattcaagaagcataagaagcaggctttgctagagtttgccgagtcctaccctagtgaaggcttattaatattcaagaagcattgataacggggatgcagtcctgatttaggatgccatcaaaattgaattaatacttaaggagcgaagcagtatgatcattgaccgaataaaccaacaagcaagtatcaacaacgccagaaagctgttaaagagctatgacacgattagacggctagccacagtaaatactagtcatcccttacacgagcaggctaagcgtgatttaaagtgtatccaagcgattgtaggaggaatggaagacacgcaagcatccattattaatatgtgttacttagacggtagtcataaaacaaggcaatatatagcggacacgatggggtatagcaggtctagttataatcggtttaagaatagggcgttattagcttttgccgaaagctataataatcaggagttgcttgtttataagtaggttgcgcaaaacttcgcaggctagtttatggattagtaattgaataggacaagccattattggtttatccaatgtaaacctacgtgaattagctttaaacccgtggtggtagcctttggtgttaaatataactagacaaaagtagacaaaatgccctttttttatttctatccgtacaaatcagacaccctaaagagaatgaataatgttggtttttgttggacataaaacctaacaaaacctaacattaatttatttagagattttagaggccctaaagaaggagtcaccgaattgatgactccttaaagatgagttagtatattacaacagcatctaatgcactgatatggtgcgtcagatacttagccaattatagaaacagtacggccgaaaattcggccctaattaactttagataccgttgattttaacgagatgttgcccaatccatctttggtttcggctaattgcatggaagcaatctgaggtaccgaaacggtagtttagaaaaaggaggccctaaaatagggcggtttgtcgaaccatgaaataacctgccataacagatcgttctattaggtcaaaataaaatgagtacagcggaaaattccgtgctactcaattagatataaattggctcaagcttgagcagatgtgttttgatatagaaacatatggagtaacgaaacgttacccctagatattatctaggtcgaaaaatacaaccaagctaaacttgggcccgtttgaaacgtctgtccaaaactggaggcacccccttatctaatgaatacagtcgcgatttacgacggaaaccacaaatttaataaaaatgaatgctaatggttgctagtatgtttttaacagtctatgtttaacttaaatcgttggctaatgaagttagcccaaattaaaagacggccattaatatgaccgcctgcagtaagttatgtatatgccccgtgcgtgatttttgttgaatacgtgaatacggttttgaatacggtttgtcgtattcactgtgaatactaatctgctaagaagaaataaaaaagccgtcatatcaatgcctaagcacctctataacgacttatcatgtatacttgatgggtggtcaggggatcgaaccctggacccacggattaagagtccgttgctctgccagctgagctaaccacccatatgatgtctcgccttacgacttaaatatcatagcatattaaacaaacttttgtaaacagttatttgtattttttttgaataaagttactgagcgcgtaagaattaatcgttatagggattaacaatgtcgttaatccagttggtaggaattgacctaattttgaattgccttctgaaaatgagtataatagaaggcaaagcatccacattcaaggaggatccgcacatggctaaaaaaatactagtcgttgatgatgaaaaaccgatctctgacattgttaaatttaatctaaccaaagagggttacgaagtctacacggcttatgatggtgaagaagccttacaacaagttgaagaggctgtcccagatttaattctattagatctgatgttaccgaagattgatgggctagaagtggcccgccaagtacgtaaatcgcatgatatgccaattattatggtgacggctaaagattctgaaatcgataaagtgattggcctcgaactcggtgccgatgattatgtgacgaaaccattctcaaatcgagaattagtggcgcgagttaaggctaacttacgccggcaaggtacaacgagtcaatcagataaagaagcgaatgaagaaaatcacgagattaacatcggggatttaacgatccatcctgatgcttatattgtgtcaaaacggggcgacaagattgaattaacgcatcgtgaatttgaattattacattatctagccaaacatatcggccaagtgatgacccgtgaacatttattacaaacggtttgggggtatgattacttcggtgatgtccggacagtcgatgtgacggtccgccgtttacgtgaaaaaattgaagacaaccccagccacccagaatggttagtgacacgccggggtgttggttactacttaagaaatcctgagcaggagtaaatttgccgcatgaataagaaaattcggttgctacaatcgattcattttaaaattgccattgtgttcgtattgttgctgctggtaacgttggaagttatcggcgcttcttttgtgaagcaactggaatatcagaatgtgcgtgattttaagcaatccttacaagtgacaccctatattcaaaaccaacttagtaatgagttactgagtaatagtggtaatgcgaacaagaatattaaagagattattggcgatatgggcaattctgccgaaattcaagttgtcgataataagggcaccattcgaggtgtcacgaacttgaataatcaaagtaccgttggtcaaaagacgcgtaacccacgggtgaaacaggttatttactctgggcataccgaacaagaagtggcatacaatgagagtctagggagctattatacagtgatccaaccattgacgaacccaagtggggatagtaataccgttgtgggcgccgtttatattcgggctagtatggaagatgtttataaggggatttcgtcgattaccgtcattttcttaacctcgtctttagtcgctggtttattagggatggcattatcgattgttatttcccgggcaattacccgaccaattgatgaaatgaagaaacaagcgattcaaatggcgcgtggggattactctgggcaagttaagatttatggtcaagatgaactggggcaactcgcgattgcggtcaataacttatcagttcgggttgaagaggcgcaagaagcgtcagagtcggaacgacggcgacttgatagtgtgctcagtcatatgactgatggggtcattgcgactgatcgacgaggcaatatcacgattatcaatgaaactggccaagattttttaaatgtgacacgcgatgagttactgggccagtcattgcttaaagttttacgaatcagtgatgaatattctttgcgcgatctattagaaacgcaacaggaaatggtcttggatttctcagaacaacaagatcacgacttaatcttgcatgttgatttttcattaattcaaaaagaaaccggctatatcaccggtttagtttgtgtgctccacgatgtcaccgaacaacaaaagaatgaacaagaacagcgcgaattcgtttcgaatgtgtctcacgaattgcggacgccattaacaagcgtgcggagctatattgaagcgctgaatgatggcgcatggcaagatccagagctagcgcccaatttcttaaaggtgacccaagaagaaactgatcggatgattcgaatgatcaacgatctattgagtttgtcacgaatggatcaaggaacggcaaagatgaatctcgaatatgttaatttaaacgagttctttgggtatgcactggatcggtttgatatgatgatcaagcgggatcaagagcataaagatgatttgcctaaactgacaaccagcacgggcaaattgccaacagatgatccgaataagaagtacagtattacacgagacttcactaagcgggatttatgggttgaaattgataccgataaatttatgcaggtgatcgataatatcatgaataatgcgattaaatattcaccagatggtggcgtgattacgtgtcgcttattggaaacacatcgtcacgtgattttaagcatctctgatcaaggattagggattccacggaaagaccttggtaagatctttgatcgcttctaccgggttgataaggcccgttctcgtaaacaaggcgggactggtttaggcttggcaatttctaaagaagtgatcgaagcgcatcgtgggcgtgtttgggttgatagccaagaaggtaaaggctcgacattctacatttcgttgccatatgaaccaattgattctgatggaggtgattgggatgcgatttaataactttttaatgcgcgttatactgattgctgccattatcgtcagtatcgggctatcatggctaatctggaccagtaacgcgcattatgagcgccaaacggacagtcaaaccaccactaagtcaacaagtcgtaagacagaacgaaaaatcggtgatatcttcttgccgacgcaactattgtggcggacagacaatcagagtcagttgatttataactcaaaagagagtttgattccacagtttaaagcgactttaaagcttgccaagtcggcacagtttaagcaagttaagctaagcgaagacgattattaccaggcaattagtgaggatcatacattgacccttttatatcctgataatatttcgtacgctatttttaaaaaggtcttcagttatcagaataataatttaggtcaaaacgtgacattcaatcggattcgaatcacgttgggcacacagcctaagttgtggttgatgaatgatcaaagtcatcaagtgtaccaaacgacactcaatgttttttcacaagctcgtgtgaaaaaggtgcttaaaaatgccgatgtgcatttgaaagtgaccgaaaaaatgttgaatcacaagccattactctatgtggcagcggatcaaacgttgttgccttatagttatttagttaatcaacaacccgaaaattattacatcacaacgctgttgaatcaacaaaatacggataatattgatacgaaagaacaaggcaatagtgcgatttatacggatgggacggacagcaatttgtataaacgcctaacgatcaaccatgataccggtgaaatttcgtttgtgaagtatgaaaatgagaaatcaccaagcacattaacaaagagttttgaagccagttttgatgcgcttttaaagacaggtaacgccctttcagggatgcgtttctatagttatgataaagcaacgaattcgactgcttatcggacctacgttgaaggattcccagtcttttatcagactaactttgggagcgtgaaagtacaattcttaccaactggccaaaagattgatttttcaaattatagtttgcaagtacccgttcctgctgaagacaagcaagtcacattgccaagtaccgagtctgttttgaatcaattgacaagtaatggtttcttgctagaaaatgtggaaaacgtgcaagtcggttatgaatggaccaaagaaaccagtaacgaacaagtgattgatttaaatccaacctactttgtacagtataaaggggtttggcgtagcttatccgcattgatggcgcaaaaagctgaattaaccgaagggagttagatgaatggattttcgcagaattgaaatgatttttatcgccatttttattgcgctggatatctatttatttgcctcgctgaaaggcagtcagacaataacgtcgacggcgattactagtggttcacagactagccagattatgaaggatttaaaagacgatcaaatttcagtgaagaaactctccaagcgccgaatggatggttattatttagccagccgacaaaaagatcagacattattagaaacggcgagtgccaaactaaccggtcaaactgtttcgtttgataaagcgcgcatgacactgacgagtgaattggataaaccactgacttacaaaaaagggaaccaacgcttagccgtggcggcctttatgaaggaaccagacaacgtggttcaagcggaggactaccgctattcacacgcattatcgagtgatcaacaagtcgtatatgtgcaaaaagtcccaggcgggcagatcatggatgaacatggtcagttgatttttacattagaagacgggcagattagtcattacacgcaaacttacacgaataagattcaagttttgcgtgaaaaagaaagtacgaaggtgactgctcaagacgcggtcattgatttatatacagataatgagattccgaataactcacgcattatgtgggtgaaactcggatacagtgctttgttggacgccaatagtagtacggtgtacgtgccagcttggcaagtggccattgagaataagaattctaagagtgtcgtcgttaagcggattaacgcctttaccggtgcgctgatgaagaaccgtagtgaaatttagttgttttagaaagagaccaaggggatagagcaaaacatggtagaaaaagacgcaatgcaagtcagcgtgctcgcaagcagtagttctggcaacacaacgtatattgaaacacctaatcataaagtgttagtcgatgcaggaatgagtgggaaacgtgtgcaagatttaatgcatagtattggccgcgatcttaaagatgtggacagtttattagtgacccatgagcatcgcgatcatagtagtggtgtcggtgttttggcccggcgatacggaatagacgtgtacgcaaatcaaccaacatgggatgcgatggcttcgattattggtgaagtgcctgctgaacacaagcacatttttgaaatgggtagtaccttgtcagttggtgatttagatattgaaagttatggggtgtcacatgatgcggctgctgcccaattctaccaattccatcataataaccgtgcctttgcaatcctgaccgatacgggttatgtctctgatcaagtgcgtgggacaattgaaaatgcggatgcttatttagtggaatgcaaccacgatttagagatgcttcggatgggaaagtatccttggtcattgaaacaacggattctcagtgataccggccatttatcgaatgaagatggggcatccgctttgatgtcgtttatggggaaccagactaaacgcgttttcctaggccacttgagtcaagaaaataacatgaaggaactggcccatttgacggttgcgtcgatcttaaaggaacatgattatggggtgggaatagactttgaaattctagatactgatccggcagttgctgatccattgtttgccgtgtaattagactgaatagaagacattttagttgtttttgcgaaataagttcgctaaaatgcggattagaaaaacaatttaatattcgtaacttgttcataattttttcaaatttacattctatgatagagataatcaataaacagaatttattagaaagtttgggtgaattagtatgaatcagaattcaggattaatgaaaacggctgttgttgccgttatcgcagcactaatcggtggtggcgttgctggttatgccggttcaaagatgggaagtaacactgtctcaagcactgcccaagtaccaactaaagcaggtgccactaaaattagtaatatcaaagtcaactcatcttcacaaacaacaactgcctttaataaggtcaacaaagcggttgtgtcagttgttaacttgcaaaaacaacaagataattcaggcgatttgagtgcgctctttggcgcggatagtaccaataaaaaaagtagtagtagtgagcttgaagaatcgagtgaaggctcaggtttaatctacgaaaagaaagatggtaaagcctacattgtcacgaacaatcacgttgtttctggctcagataagttggaagtcatccttagtgatggcacaaaaattgatgctagcttagtcggaacggatgccgtttctgatttagccgttttaaagattgatagtgccaaagtgacgaagaccgcaacgtttggtgattctgacagcattaaacctggtgaatcagtgctcgcgattggttcgcctttaggctcagaatatgctacttctgttacccaagggattatttcagcaaagaaacggacgattgatgtgacggatgaaacaaccggtcaagcgactggccaagcaaccgttattcaaactgatacagcgattaaccctgggaattcaggtggtccgctagttaaccttgcaggacaagtcatcgggatcaattcaatgaagttagcttctaacgggagcacaacggttgaagggatgggctttgccattccaagtaacgaagtggtcaaaattattaaccaattggttgcaaatgggaaagttgttcgaccagcgcttgggattagcgtcatcgatttgacgaatgtttcatcaacgcaacaatcatcagtcttgaaattaccaacctctgtgaagagtggggtagttgttgcatcagtcaatgccaactcagttgctaagaaggcagggattagtaaatacgacgtcattgttggtttaggtggcaaggatgtcacaagtgttgctgatttacacacgacactttacagttacgatatgaatagtacggttgaaattcagtattatcataatggtgaattgaagaaatcaacagtgaagttgactgaagcagcatcaacagatagtacaacggcagcaaaataaattaaagccgccagcatcaattagatgttgacggcttttttattttggttaaattcagactaaagtggcaggaatgttaagttttaaaaatgtcaatgtggatagtaacctgggaagaaatccgagcgtctgtggataagtctgtggattgtgggtataacacggttaaaaggtctttttagttatccacaaaaaaattaacaggcggtggataacttttttaaaattattataacaccagaataacgctgatataaaaggatttgtaaccggataatttgagaacgaacaatcaaaaaagggtggataacttttttattaaatttaacgaaaaaatttaggtgtcggttatttagtatcaagaaaaattcgagataccatatttgggacgaacacttgtgcatatgtggacaacttttgtggataagcagtactttccggtgaattactgtgaatagctttttttctgcattgttttcccctaaaatgtaagtaacagtaggaggctatttatgaacattaaagtaatcacagttggtaaattaaaggaaaagtatttaaaagcggggatcgtggaatatgcgaaacggctcagtaagttctgtaagttcgaaatgattgaagtcgcggatgaaaaagcgcccgaatcattaagtgacgctgaaatgactaacgtcaaagacaaagaaggcgaacgaattctcaacaagattaaagataaggaacatgtgattgtcctggcgattcaaggcaaacaacgtgcctcagaagaattcgcaaaggaaattcaagatttggcgacctatggtaaatcagatatcacatttgtcatcggcgggtcactcgggactagcgatgcggttaacaaacgcgccaatgatgcactttcatttggcaagctcacactaccccaccaattgatgcgcttagtattgacagaacagatttaccgggcgtttatgattaatcaaggaagtccgtatcacaaatagagataggcataaaaggcctcattgttgaatgaggcttttttatatgcaacaagagagagcagcttgcaacaaaacaaatagtcatcgaattaagcgagatcttctgctatctttaggtttgtagaggaggcgagttaatgaaaattatatttaattgggattcaaagtgtgcacaagatacgattgtcgttcacagtcaaccacagaatcaagcaacggttgaatctgcttttaagaagctaacctttgatcaatcgattcaggtgcgagatgcgcgaacagatcgattacaaaacagatcattaacggcaattgaaagttttacggcctttggacatttggcgaaggtggcgacaatcgatggcaatagctattactaccctagtaatttaaaacaattagccccgttttcacagaacggttttctgagaattaataacacaacgattttaaatctgcagcaagttgccaattttgcggtgggttcaaatgcgcgattggtggtctatacgtaatctggaagacagtatattgttagtcggtattatgccaagcaaataaaggagtggttaaaatgatgaagcaaatccgcaaagactttaatcaagtggcattaatggcgattatgtggctcactgttgtcacaacgctaacacggggcgaagcgctggctgcttggcgattagttagcctaggcgtgttgattggcgttgtgtttggcgtcatttattcatacttatggcgctattcgacgttcggtgcgccgtggaatgttttgattagtactattagtaatattgggtttcaaatactcgctttgaggctctattcgacaacgttatttgatgttgtttcaccgtatttattagggacgtcgttattaacattcgtaatgcacgtgattattttttattactacacgcgctatcaaaataagcgcttagtgaacgaattgaatcaaaatagaaaataaacttgttgtcccctttgcaggttgtttatactagaggaactaggactatttgttaagtagaaatgaggggaatctgatgacgaagagacaacggaaacgactttggctagcaagcggtgtgattttactaggattagtgattcttctaattggatggcaacaccagaccgccgtttttgctttcttggatcaatggcaaaattaccgccaatatgtgcttgagattcgtcatctggggccgtatgctttcttggtgtttggtctgttaatgattggggtcaccttaattccgggtgcgccaacatcagcggtggcattgattattggcgcgtgtttgggtcattggggtggtttcgtggtcaatgcgattggcttgacgatcgggaacttgttgcaagtccaattatttgcccgtgtcagaaatcatcgcagtaaaaagccggattcgcgtgtttaccgcgcattaattaagatgcaacatccagcgcttggtgtattaattggctatgcagtgccgatgattcctacggcctttgtcaacttggcggctggagacacccacctcaccccccgagcacagggcctggcgtgctttgggggttcaacgattgtcgcgtttatctacgcctttgcgggcgatttgcttattttgaagcaagattggaagagtttattgattctcttgatagtcgctgttgtgattggtttaacggaatatggtatccggatgcggcggagtgataaagctcgccaaaaagtcgaacagtttgacgcattaaattaaagttagaggacgtcctgaggagggcgtcttttttatttgtgtgaaaatgtatatgataaggtatgatattaaaagtgattggtatactgaagtaagctcgttaaacgaaataacttatactataataaatataaaagaaaaatacatggagcacgcaatcgtgagtaagaaaaatacacttttggtaacattagcattattattatccaacacaatggcgggactcgatgggacaattatcaacacggctttgcctgctattatcagtgatttacacgggattcaatatatgggctggattgtggcggttttccttttggggatggcggttgcgacccccttatggagtaaattaggcgaacggattggaaatcgtggggcttaccagctggcgacattattatttgcggttggttcgatttttcaggcggtttcggggaatatcgtcttctttctgattgcacgaacggtgatgggcatcggtgctggcgggatgaatactttaccattcattatctatgccgacttatacaaaaatttacgcaaacgcgcgcaggtgattggttatgcgactgcgagttatagtgcggcttcaattgtaggtcccctaattggtggctggattgtcgatacgtttagttggcattgggtcttttatatcaatgtaccaattgccctagtatcaattgtttgtgttcgttatttctttaaagaaacgcttaaatcacatcaaaccggaaacgtcgattatttaggtgctgggattatgattaccagtttggtgactttattgacggggattcaaatgattgggacgggttcgctagcactcgttttaggattggtatttgctggtttagctttattagttgtcttgtttagagttgaagaccgggcagttgatccgattgtaccgaaccgcttatttaaaaatccgcaattggtgaccgactttattttatttgttgttttatggggcgcatttatcgcgtttaatatctatattccaatgtgggcacaagggctacttggattaagtgcgctactcggtggaatgacgcagattccaggtgcggtgaccaacttaattggctcattggcgggtcccgcaattcagcctaaattgggtaaacaccgcgttgtgacattgggaacagttgcgtttttaattgcgtttagcggtatgttgatgatgggcgaccaagcatcgttttggttcttactgttgatgggggcctttgaaggtttcgggctcgggatgagttttaacgtcctacaaatcagtgttcaagaagatgccgaagaacgtgatgttcccattgcgacgtcgtttgcctatctcttgcgaattctcagtcaaacattcatgtcatcgatttacggtgtgattttaaaccatgccttaacacgcggcattgccgaatcgcacggtcaaattacgatggcgatgatgaataagttaagcaatctccaacgcgttcacgaattaccagcgcacttattaccagcgatgcgcgcgattatgtaccaaggcttgcataacatcatgctgattgcgacagtcctattggtgattgtgctcgcgtttaatatctggttacagatgaaggcgaaaaaagaaaattaaaaaaagtgttgaaggtcgtgagtaagttggccctcaacactttttttaataataatattttaaatcactcgccgggcttgggtagttatagatggtatcggtgagttccgttgcggttgtctgatgtttaatcaggttggtaaagtaattaatgagttcttcagcaattgtggtgtaagccgcagcaccgacgagttggttagtttgattgtcaaaaatggtgatgaccattgcgtcggattcttgaatacgattgaaggtataccaatttgtgacggtttgttgattaatgcggtattgactaggagcagcttgtgcagttgcaacagaaacgcctacttgtgatatttgtgggcttgcatataccgtatgtggaatgagtgggtaagtaatgggtgctgtctttttagcgagtagttggttggcgacatagcggccttcaaaaccagcaactggtgttaatttgggttggacacgatctacgacgtcaccaatggcgaagacgcggggattactactcattaaatggtcattgacttgaatgccatgctggttcgctgttaccccagctttttccaatgccagttggtcgatattgggtttgcggcccattgcggcaaaagcggcgtcgactgtcagtttaaaattagcttgattactgagagttagctgattgctggtttgcgtaattgttgtgacgtcagtgtcaaaatgaaagtgaatgcctttttcctgaagactggtgacgagtttatgtgttaaaacttcagggaagtcgcgtaaaatacgctcgttatgttgaataatatggacttctgcaccagcagtaactgcaatatttgccagttcaatggcgatatacccgccaccaataaaggcaaccttttctggtaaacgatcgaggtctaaaaattcattactggtttgtagtaaatcgtgaccctcgattgtagggagcgttggtgtttgaccggtcgcaatgatgaaatggtcggcagtgtaagtgtcaccattaatctgcaaggtttgagtatcactgaagtgggcggtgcccgtgacggtttggatgccggcatgttgtagaccgttgagggtaccagttgggatttgttgcgtataagatcgcttaaaggccatcagttcagaccagttaatagcgctagttccgactaagccatttgtttggagcgcttgttgattgtcgagtgcttcgacagctgaataaagcatttttttaggatcacagccacggttggggcaagtgccgccccataaatcattttcaacgactaagacggactgttgttcagcgagactgtaagccgccgctaagccgccaggaccgccaccaataatgattgtatcaaagtgtgtttgcatattaagacctcctcagatttcaattcgggttcatcttagcatagtcacaaagcgaatcaaaaaaattggattgggtgtttaagcacgtcaattggtgggctgattgctaagtggtacaataagttaacaaatcgttaaccggaaaaaggagtagcacatgattgaatttgaaggtgtcactaagcaatatgaacaaagcttagcattagatggcttgacgttaaccattccagacaatggtctatttgttttggtcggaccgagtggtagcggaaagacaacaacggttaaaatgattaatcggttaattgaacccacgagtggcacaattaagattgacggccaacccatcaatcaaatggatctccaaacgttacggctcaatattggttacgttctacaaaacattgcgttgtttccacatcttacaattgaggaaaatattaccattcaattagaggtattgaaatggaccaaagctgatcgtcaaaaacgggcacgcgaacttttggaaatggtccatttagatccggatcagtatgctagccgttatccaagcgaattatcagggggacagcagcagcggattgggattattcgtgcgttagcaactagttctaaggtgattttgatggatgaaccctttagtgcgcttgatccggtgacccgtacacaattacaagatctcgttttgagtttacaaaagcagctgcataatacaattgtatttgtgacccacgatatgaaagaagcgttgcgcttgggtgatgaaattgcggtaatgcgccaaggcagtattcagcaagtcgggacagcaaaagcgatttttaatcaaccaaaaaatgaatttgttcgcgaattttttgacattgaacgccaacaagcatcgttgacagttcaagatttattggcggccgatttaggaactgttgttaataatcagccgacaacgattacgtccagtgcaacattagctgaattagcgcaacaattagtagaccatccagatgggggcgtagttgccactgatggtcaagaacaacggcaattgacgatgaccgatttaacaacgctcattgcgaaacgggggctataacgatgatgcaacagattgaacaaattttaacgacccaatccggtgagttgctacaagcacttgggcaacatttggagatttcgttattggcgttattaattgcggcggctatcgggattccgttggcgattgttttaacagctcatcagaaattagctgaagcaatgctgcaagtcacgagtgtcttacagacaattccgtctttggcgctcttaggattattgatcccgcttgtcggaattgggacgattccggctgtgattacgttagtactttatgccttaatgccgatttttcaaaatacatacactggtttgatcggaattgatccagcattaaaagaggcagaaatagccttcgggttgccgcgcgctaaacggctactacggattgaactgccacttgcgatgccgttgattatctcgggtttgcggattgcactcgtgatgattatcgggacagctaccttggcggccttgattggtgcgggcggcctcgggacgtttattcttgttgggattcagtcaaataataacgcactattattggttggggcgacactttcagcggttttagcgttagtggtcagtgcattaattcgctggttagggacattatcctttaaaaaaatcacagtcagtttagccatttttgttggccttttcggtgtgatcgaaggaatgacacggtttcaagcgccgcagaccaccatcacgattgctgggaaattgggtagtgaacccgaaatcttgatgaatatgtatcgtgatctaattttagaagaccagcctaactacaaagtaacggttaaacctaatttcggtgggaccacattcttatttaacgccttgaaggctgataagattgatatttatcctgaattcacaggaacggttttacagacgttggtgaagtcgccaactaagacaaaccagaatccaactaaaacgtatcaacttgcaaaaacatcgctacaagaacagttcaatatggcgtacttaccgccaatgcgctatcaaaacggttatgacttggcggttactgcggcctttgccaagaaatataatgtcaaaacaatttcggatttagccgctttgaatcaaccatttacggccggttttgatcctgatttttatcaccaaaaagatgggtatcaagggttaaaggacacctatcaattaaatttaaatgctaaaattatggagccaagtattcgctataaagcgattgcggacggcaaggtcgatgtggtcgatggttatacaaccgatgcggaagtcgcacggtacaaactagttgttttagaagatgatcgtcacttcttcccgccttatcaaggggcaccgattatgaaagccggctttgccaaggcgcatccggaagtcgtcaaagcattgaatcgcttggcaggtcagattactgagagccaaatgcaagagatgaactaccaagtacaggtcaaacaccgcaaagcacgcgatgtggcccatgattacttggttaaacagaaattaatcaggcactaacgaacaatgcttgaccttcacgtcacgtcaggccttatagtgggttttgaaggagggaaggcaaatggattatcagattaaaactttcgctgaattgaccggggtttctgagcgtacgctacgttattatcacgagcgcggtttactggtgccaacggttgctagtaatggttatcgaacgtattcgagccaggatgcagatcgactgcagttaatcttaatgtaccgtcaactacagtttagtctggctgagattcagcagctgttggcgttaccaccggccgagcgtctggaacgcttagcaaatcagcgggaacaactggttaaacaacaagctgcgctaacggcaacgttagcacagctagatgcgacccttcaaaatcaaaccggaggaattcaaatgacagatcaaactaaattcaaacagtttaaacaacaggcagtggctgaaaatgagcaacgctacgggcaagaagtgacgactaactatgggaaacaagccaagcaagaagccgatcagcactttttagggctaagtgaggcccaatatgcaacgatgcaggcggctgaagaccgattgaagacggcattacaaacttacttggaccagccgcaattgccatcagaagcggcgcaaacagcctttgaagcccatcaaacgtggttacaaacagcgactccccggtatagtctagcaatgcaccgcggtttagcagccatgtatgtagcagatgaacgatttacagcatactacactaagttaattggagatcaacgcgcagcggaggctttacaaacgattattgaatattatgcaattgaagcctaaaaaaggactgacatttgtcagtcctttttgattatttagcgggaattttccgtaatacccgtgctggattaccaactaaaattacgttacccggataggatttggtcacgacactgccggcaccaacgacaacgttattgccgagcgtgattcctggcagaattgtgacatttgcaccgagccagacgtgattgccgatagtaatgggactagaaatttctttttttgtcgcacgttctaaggggtcaattgggtggtaaggggttaagagtgatactcctgggccaaatttacagtagtcaccaatggtgactggtgcttcgtcacaaataacgacgttacgattggcgtaaaaatgatcgccaatcgtaatgttttcaccgaagctaaattcaaaaccggtttcgatgaaaaaatcgctaccggtatgaccgagtaatttttggatagtggccatccgtgcatcgttatctaagatttggctggccttttgtaaggcaaggcgggctgcatcccgtttttgaatagtgaccgctgaatcaaagtaccattccccattggtcatcgccctaaaagcgtcgtcagtttcgtgcatattataagtcgcctccgttaattgtactctctaacgatagaacaatttatcctggagtgcaaatcgggttagtgattgcagttcggaactatctatgggatgctaatcatagataatttttggagggcaatacgatggataccaagcaaaagctagcagataccttaaaagaattgatgaaaacaactccggtcgatcacattacggtcaatcaattgacgagcagtgctgacgttgcgcgcaatacgttttattaccatttcgccgatattaatgagttggttgcttggatttataatcgtgaaattgttacgcaactggcagtgtatcaacgtgaacgggattgggtcgtcggtctaggtgtcttggtaacttatattgaaaacaatcggcatttctgtttaaatacgtttcattcacttaatcgagatttactaagtcgttttttgtatcgagttgcttttaacatggttgcaggggttgttcaagatttaaaggtggattgtccagcgactttccgagatgaaattgccaattttatggttgggcattggcgacacagattacgcaatggcttgtaacaaatctacaagaatctaaagaggaattttatcagcgcatgcatcgcatgttaaatggtactgtgaaccatgttttacaaaataatcattagatttggacatttatcctgaattgaccatacagaaaccgccagcttgcagttaaagtaagaatgtaattagcaattatttctttggaggtgactgatatgtttttatttcaaaatatttcaggaatggattggctagtttggggactagtggttattgcattaatggttttaaatgaagcagctcgggctaacaagtggattggattaattctctttgttgggttaccagtcgttttaacgctctttgtttggccaacgacggctggtcctggtagcagtaccgggacttggttccactgggttaaagtgtactcagcattagcaggttgtttagggtttatggcgctgcgctttatccctaagttacaacacaacaagtgggcattgattttcccacccgcaattttagcgtttaatattatggaagctgtgattcgtgattttcaagtttcacacctacatggcttagtcgacggtgtgatcatgaatggtggcgcgtggaatatcatgaacgggattgccggaattattaacatcatcacaatctcaggctggttcggcattattatcagtcatgacaaacaaaaagacatgatctggcccgatcaaatctggccttggattatcgcctatgatgtttggaacttcgcctatgtttacaattgtgttggtgatcactcattctatgcgggcgctgcattattaatttcatgtacattagcagcattcctggttaaaaaagggagctggctccaagcacgtgcgcaaacattggctttttggatgatgtttacaatgagttatcccgcttttgtaacggattcacaattttcagtgcaaggtacgcacagtagtgctgctttgatgacaatcagtggtttagcactggtcattaatgtggcagtcttaattctccacatttatcgtgtcatgaagtataaacgcaacatcctaactgacgaagtctatgctggtacaaaggcctatgaccaagtcgtggcagaaaacacgtcggaaggtaaataaaacgaggctcaatgaaggcgcagttcaatttgaactgcgtctttttttgcattttatagtatgatagatcctataaaggcgggatcaacatgacaactttttattttgtacggcatggtgaaacgatggttaatcgagtacagtgtttcaatggtggtgggacgaattcaacattaactgaggcggggcaagcggctgctaaacgactaggtagtttattagcggaccagtcttttgatgcgttactgacgtcaccattaacacgtgccgttgaaacaatggatgcgatagtgtcgcagactaatcaatcacaaccggcaatcatggtcgtggatgatttaaaagaaatggcacttggtgattgggaaggccaacctggtgctagtttgacgaaccatccacaatatgaaaattacttccatcatccagagctgtttgatgccaaacagattcacgcggagtcctaccaggcggtcttagaacgtgggatgctcgcgattaagactgctcaaacgacgtatcctgatggtgatgtattagttgttgcgcatgggattattttattgtttgttatcaacacactactagggattccgtttgaggaaattcgatcacaaaaaatggttgctaatgcaagtttatccgtactaaaaagtaatggcacgcagtttgaaaaggttgtgtggaacaaaacggtttaggaaggatttttggatgacgataattatgattcttttgatcgttgcgttgggcgcttttaccagaacggtttttgggtttggtgaggcattagtaacgatgccattattggccctagtagcgattgatttaaaaaagcggcaacggctttgattggcgcgctgggactaattgtggcgattccggcagtgattcgccaccgccaacagattgatatagcggttgtcaggcgactagtgattggttcattattgggtgtgccagtcgggatagcgctgatgacgtatgtgccaacgacgattgtgttgagaacgttagctgggtttttaatcctttatgacagctataatcgctatcagttacaccgacatcacgtgcagcagcaacatttacagtcacatcattgggattatttagctgggataatatcaggcgtgatgggcagtgcctacaatagtcatggtgtgccagtggtgatttatgggacattaaaaaaatggccagtagcatcgttaaggggcattctacaggcccattttatttgtgttgggacaatcgttgtaatcagtcatattttagcgggcttttggaccatccaagtattgcaactattgggacttagcttaccattattgttagttgtgattccgttgggcaattgggtgagcactcgaattgatagtcgaacgatggtgcggtatatttatgacttattaatcgtttttggttgtttgttgctgtataaaacgttgtaaaaggtcattaataggtggttggtttattaaatgatgtaaagcttatggacaacgccgcagatagtatactaaaacgatagtgtataaagtttaaatactaaggggcggaaattaatgagtaaagtattagttgttaaggcgcatccacttgctacagaatagtcacggacgttaacgattttggcgcagttcatgcaagtttatcaaaaacaaaatccagctgatgaaatcagttggttggacttgtaccaatctgacttaccagaaattgatcaagaactaatgacggcatgggcggcgttaaaaaagggcaagctatggccaccttaagcgctagtcagcaagagaaggtcgctcggtttaatcgctataccgaccagttcttagcaaccgataagtttgtgattgctaatccgctttggaatttaaatgtaccgacgaaacttaaagcgtggattgacacagtgatggtggctggaaaaacatttagacatactgaaacagctccgcagcccttagtaactgggaaaaaagcagttcatattcagtcagccggaagcgtttatgctggccaagattttgcaacacaatacgttaaaacaattcttggctttgccggtgttgacgaagtcattaaaattagtatcgaaggaattgattattcgccagaaaaagctaacgtgattatgcaggaagctattgaaacagctaaacaaacggcacaagttttttagaggcgatatagtggagggataaccatggattttgaattaccgatatatccagaaaatcaggcggcaatgaagaaatacatgcagagtcaatttgaatttaacggtgttaaagcaccggaccgccatttaattgaacgcgaattgtggcagtctgtgaaacaattgtcaccagcagaaataatgcagttcattgagactttatatgctcaaccaacgcgtgagtatcaatatgttgccatcgagatggcattgcgttcagtacgttggtgggaaccggctgatatggaacatttattaacgttggtgttggaaaaagtttggtgggacagcatcgatgcttggcgaaaagtatttggagagtacatcagactgcatcctgaacagtttgattgggttgcacagcattttataggtgctgagaatttctggctgcgccggattgcgattacgctacaactcagtttttacgaaaaaacgaatgtggcgtttttggaagaagccattctggcagatattgacacagatgagttctttatccaaaaagcaattggctgggctttacgtaactatagtaaggaaaatcctgagtgggtgatgacgtttgttgaagaacacgaactaacaatcttcgcccaacgtgaagccttaaagaaaatcaaacaaaacaaaatgtttcacaggaaacatacaaaaagcagcacccatgataactaatcaagggtactgctttttaataacttaatttaagagggtaacagctaataacaagtattaatggtactaggataagctaatttattatttatctaaacccgccagaactttagccggaatttgattcttggacacagtattaggcccttttaagacgcgttttgaattaaattcaactttgacatagctgttgggagtgagtggcgttggattttcgccagtaacttcgacagggaccacttggtggctaccatcttctttcaccacatttagttggtagtgatagctatacatattagtcactgttttacctgaatcatctttggtggcttctttagctggagattgagcagcaactttggcgtagcctacttcgccgacatacgtatttttgtattaacggtagccagcaaatccgacgatgatgagggcgattatcgcaataatgctaattgttttttttcattgaatgagaactccttattccgaattgataaagttatcatacgatgttaagcgtaaaaaagcgacgattttaagatcagatgacaaaagtgttagccgagttaaggccattgtcacctaatgtttaaattggcggtattgtgcttctaaaatagcgctatctaagatgtgaccgcgcattgccgctgtcatttgatttaggtaaaagccaggctgtaaatcgagcgtggtatcaagtgcaaatactttaagtgtataagtgtgatcgcggttagggggtgtcatcccgccgtagcaagcacttgcttctgttgataaatggtctgttttgggactgtgccaagtattaacaccttggatgaaatcgggcgcttgttggctagcattagccgcgacagtggtcgtttttaaattggcaagtgtccagtgaatccaaggaaacccttgcgtcacttcgtaggcatctagatcgtagaaaacggcagcataactgactgtatcgctaggtgcgtcttgaatgttaaacggaatggaataagttggcacaccttccgcgttaaattgagtgccatgaccgccgtagaggtcgtcgaagtagccgtgatgaatgccagaactgataatttgcatgttgaatctcttttctattttagattttagtccagtcgtcaattgagcgaccatttgtgtcgcatagttcgagccaactattggtgccaccaaagtacaagaagaggccgatttcattcacgctcttgaaaataatgtcttcagtcgtttgattgtcttgaatttgcgctgcatgttcgttgcgcaagtgagtgcccattttagcagcaaagccaaacgagccatccttattaagtggcgcggttggccgcaattgtgcccctgctttcaataacatctcgttgcgcttttgccagatggctgttccttgtgcttcgcgcgtggcaacagtgaattcgatttggctgatggcttttgtccatcgatgacgtgttttagccggttttgctttgactggtgcgcttttggtcaggggataaccaaagcggctgaggaccaagatgatggcttcaacggctggagctaaggttgttcggaaattttgagagacgttggacggaagcgaggcgctcgttatcggtggttgattttgctcggctaatagctgccctacgtagccaatttgttcagtccactcaggatccatggtaatccagatacccgtgtcaacttgatcagtcgaggctgtttcaagtggggagagttgttcaatttgttgcagttgttgctgcgcaaaaccgaggaataaagcggggtgtgcgaatgcggttgtattagccggtgtttgttcaattaaaagctgagtaacgggttgttcgattaaatcgacgatcgtttgggtagccgttaatgttgcattaatttccaaggtcataggaagcctcctgacagtctttgatgcttctaattaaacactaaatcgctggttttgtcagccagtaagaattgattgaaggaatgcttgaaactgagattcaattaaccggaattaacgaatctttgttatgatagaaggtaggaattttaacgggtgggagaaatggcatgcaagcacaagcggtactaaaagaaaaatttggttatgatcactttagagaaggtcaagcagatgtgatcgaatcattgttggcaggcactaatgtcttggcgattatgccaactggtggcgggaagtcattgtgttatcaaataccagcattgatgctacccggtttaacgttggtggtatcaccgttgatttctttgatgaaggatcaagtcgatgcgcttaatgaaaatgggattccagccacgtttatcaatagtacgctaacgcagggggaagtccaagaacgctttaaccaagctgcgcgtggtgaagtgaaattactatatgtttcgccggaacgcttggattcggattactttttagctgatttagctgaattaacgattgatttgattgcggtcgatgaagcgcattgtatttcgcaatggggccacgattttcggccaagttatctacgcctgacggatacgattcagagtatgcgccaacgaccaacgattgtggctttaaccgctacggcaacctcacaagtggcagctgacatcatgcaacggttgaacattcagcacgaagttaagacggggttttcacggcagaatcttgcgtttcaagtagttaaaaatcaaaatagtgatcgctacttaatcgattatttaaaggtcaacaaacaaaaatccgggattatttacgccagcacacggaaagaagttgaacggctcacgaagctgattgaaaaggctaagttagatgtgacaatgtatcatggcggattaaacgaagcggtgcgtcgtcagaatcaagaggattttctctatgatcgcaaaccgataatggtcgcgactaatgcgtttggcatgggcattgataaaagtaatgtgcgctttgtcgtgcatgcccagattcctgggagtttagaggcttactatcaagaagctggccgggccgggcgtgatggcttgccgagtgaagcgattctattatttaaagtgaatgatgtgcagattcagcatttctttatcgatcagtcggaaatggacgaagcgcataagcaacaagaatatgccaagttgcaagaaatgacgcagtacgccaatacgcagcaatgtttgcaacagtacatcgtcaattattttgatgatgattgtgaagcgtgcggccggtgcagtaactgtctggatacgcgtgaagaacaagacatcacgattgatgtacaaaaagtcttatcgtgcgttaaacggatggatgaacggtttggcaaagtgttggtggcgcaagtattgacgggctcgaagaatcaaaaaatcatgcaattccgctttgatgaactcccaacgtatggtctaatgcgtggtgattcgcaaaaagaaatcagtggtttgatcgattacttagtcgcttcaggatatttgcaagcttctggcggtcaatacccagtgctgcaaatcacggcggcgggagttgcagtcttaaaaggccaagcgaaagtgacgcgcaagatggcggtcaaagtgcaaaaaacgttgcctgaagataatgaattatttgaacaactacgtgagttacgccgcgatttagcggaagaacaaggtgtgcctccgtttgtgattttctcggataagaccctatattcaatgtgtgaaatcatgccaacttccttgactgaaatgctagatgtcaaaggggtcggcgaaaataaactagaaaaatacggcgaacaattcttggatatattaatggcagaatagagtgctgagcattgactggatttaccaaattggcgatgtaatcgctgatttggtaaatttggttaagtgcagaaatatgctggcgagaacacgtttcaacaaaaaagcgtcaacggattctaatatccgttggcgcttttttagtatctagtatggtgcatctgctggattaccatattcaaagtgttggtttgactttggattgggtttcgcatcaggtagtaaacacgtataacgtgtaccatcaggaccttcagctaggaagatgcgagtaaaatcattttcagtttcgatcagcttgcagttttcgtgggttaacccataaacatcagttacttgcgtaataatcatctctttttcttaatttgaaaggagtagagtaaccgtacattctaccaccgacttaataataagtatagacttttattgacaaaatttcaaattaatccccttatttggtttgagtttcaagctggtggagggtttgtttcaattcaagtccgccacgataccccccaatttgcccgtctttacggtagacgcgatggcaaggaataatcatcaatagtggattgcgaccaatggcagaagccactgcgcgaattgcggtggggtgcccgacttgagccgccaaagcgctgtaagttgtggtttgatcatatggcacagcttgcagggcggtccaaacacttctttgaaaaggtgtgccgccgataatatcaattggcagtgaccacgtggcttggtcaccatcgagataagctgttaatgattcactataaggagcgattgcggcttgatttgcaactaatttcgtttggggaagaaaagtggttaattcactgatagtgccatcgggtgaaccaacaaaacagatacctttgggggttgctgcaataataaatgaatggccagcatggctaaaagaaccatagaagattgttagcatttagaagccctccttttgattgccctcagtatagcatgcccgttaaaaaacgaccaagccgtaaacaggctcagtcgttttttacttagttaagcaactggttgaaaggttttattttgaagatgatactgaacatcacaacttgctgcgacttctttttcatgggtgacaagaatcacacatttttgttgttgatgggctaattcttggaagagatgaatgatctcctgcgtattttgttcatctaagttaccggttggttcgtcggcaacaacgatgggggctgaacaacacatggcgcgcacgatcgcaacgcgttgttgctggccacctgatagtttttgtacgttcttatgggcgagttcgggattgatgccaaccttgctgagcatttcgagtgcgaaatcggcagcattgtcatgcgtcgaatgagtaatggccatcgcagtcaagacgttgtcgagtgccgacatgtaggggagtaagttgtaggcttgaaacacgatggacacatagcgattgcggtattgggttaagccgattttttggatatcggtaccttcgtataaaatactcccgcggcgcggtttatctaaccctgaaagcatggtgagtaaggtcgtttttccagcaccactgctaccgatgatgccgtagagtttgccggcttcaaaatcgagattaacatctttgtaaagtgtattttcttcagtatcgtaccagtaactgatgtttttagctgttaacatagtggacctcctataattatccaatgagaattttgcgtggctcgagtcgtaaaatattgagtgatgcgagtaagacggcaaatgcgatgatggtgaagccgaatgcgccaagttgcattaaggtgacggcactaatcttcagatcaaggtcgcttgctttgacggcttttttagcagattggccaggttgttgcatttgaccacttggccgattgccaccagtttggccactaggggcttgaccgccaccagggccgccgttaccgccaggttgcatgttatttgtttgtgagctggttgtcgtttcggttgtgacggaacgcataacttgtttgctaagcgcttgaccagcgaatcgtccgccaatgccggctaaagctaaactgacaatcagcagcatgaacatttcaactaataattggcccacgattttgacgcgcttttcacctaatgagagtaaaacgcccatttcataacgccgttcgcgaaccattaagataataattaatgcgaggataacagtgccagcgatagcgactaaccaaacaatcttattagcaaaactagccattttctgcatggattgtttgagtgattggtaagtactgtcatcagctgttaccgtgaatttcttcgtattgataatcttcttcgctgcttttacaaaactatttttcttagttgggtcactaagcgtgaatgtggcactatccactttgccagtttgacctttaatttggttagctaatgtgtatgccgtatagatgacgtttgcggggtctgtttgttgtggacccatgccagcgctactttgactagccttatagatcccgactacttttagcgtataggcttttttgcctgtcgtgctggctttgactttaatggtgtcgccgactttgaggctgttttctttagccaattcggattcgatgacgacattattagtgtttttgtcgctactatttaaagcgcgacctttcgtgattttacttgtattatctttaaagtcgctgagggttgcggtattgagcactccggtgatttgtaagtcacctgttgaagtggatgactcagcgttgccgccagagccgccgcccatcatgccaccactattatttgaactacttgatgtcgtaatggcttcaatggacgaggcgttcgcagaagtcgtgacgctgacgttataatttgccagcccggataatttcgaaatagccgttacgtcttttaatttgacggagggcatggttaatttagggcgcgttgctgtagtacttggggcatcactgctagccgaggcgcgcattttcttaaacgcttgatcgcgatttgcagaaagggtgacgctagcgcccacctgttgtttggtattgttgacggttgtaatggctgcatttctaatcaatagaccagccatgataaaaatcatgatgacggtcatcacaattattaataagaagctacgcccttttttaaagatgacgttttgccaagcacgcttgataaaattcataagtatttcctccttaaaactgaataaatattagtttaggcgggaaatatgaataaattgtgtttgaaatgaagttttttttaaggcgtatttgtgaagattaaccttatagggccaactttctagctcctaaatatggtaaattatagggtatcaaagttaatcggaatgaggagagttaaatgaagaagcgacaacaattttttaccttattatggacaggattaatgttaataatgcctgttgtttcagttattggtagtgcacaaacggtgtctgcgagtgagacaaaggttacacaagtgacaccacgtactgcatctagtacggattatcaaaaagcaatggtggctggggcgcaacagttgttgaataatggccaaccagatgcatggtcagcgttagcagctattcaatcaggcgtgacactgagtgcagcgcaacgcttgagttatcataatgccttggttgcggatgcacaatcaatgctcgctgatcaacgtttttcggcaaccgatttagaagtgttggtaattggggtaacagcacttggtgaagatgcaaccaacttcgctggtttaaatataattgataaaattattgaaaaagcaccaactggtgggatcaacgggcaagtttacggcatcatcgcccttagcatgcgtgattatggtgccaaggcacagcaagcgattgatagtttaattccaacggttttacaagcacaaaacgctgaaaatggctgggcttttttcggtagtaaaagtgatttagatacgaccgggatgacgatgacggcgttggggatgcatcgtgacttcccaggcgttcaagatgcgctagataaagcggtaacgatgttgaaagaaaaaacatttgttgcacaaacgggtggttttttaatccctagtgtttatatgacagaagaaaactcaaatagtacggcaatggttgtcatgggcttaattgcagctggagttgatccagtcacaacatttgttggcgatcaaggcgctaacccgatttcacggctggtcgcttatcaaagagcagatggacagttccgctggaatattaataacgatatgggatcgctagcgatgtcaactgaacaagccgtttatacgttagcccaataccggttgttccaagcgggaaaaggctcaatttatgattttaaaacgccagttattgaaaaagcatcggtaaaggcccaagcagttgatgaaaagggacaaattttaaagagtcttcaattagctgaacaacccgttggtcaaaccattacggtgaatgctaatcaagtcgcagttgagggttatgaattattaggcaatgcacaacaaactgttcaagttgctaaaacgggaacgaccgtgacgttccagtatcggaaacaaatgattgggacaattcctgcagcgcagtttgctgacgttacggtgcaagcagtcgatcaaaacggcaaagtgtttaaaacaattcaattgcagcatcaaagagttggacgcacaatgttgattaatgcatctgatgttgcagttgagggttatcaattaaaagacacgccaaccaaatccatcacgattaatgcagcgaataatacaatcagtttcaagtttgaacgacaagtgactacggttgaaaaagaaaataaacaccaagcagacaatcaagatcatgctcaaataaagcaaaagcaattaccacaaacaggtgttaactcaacagtagttgcttctgtagccggcttgatacttttgactgggattattggcatttggttcaagcgtcaagttgaacatcgttaggagttagatatgtctaaaaagagaatcattgcgattatcggtagtttagttattttaagcggcatcggatacggtacctatcaaagtgtggctcaagataatccgtctacgcgtagtcaacatgttaaagaggaacatagatcaaaaaaacgggtcaagccagcaactgttggtttagatggtaaggttaaatctaaggcctctgagtcacatagtagggcggtatctgaaagtcggaaaacagctgaaacgcgcaagtccagcagtcaatctgaacagacaaatgaatcatcacaaaaatcggcctctagcaaacaattagcatcgcaacaagctgtagaacaaggctcggcagtccaatcggcatcgacccaatccgccattaatcaatcgtcacaatcaactgaaagtaaaccagttacaccgcccactacgacgccccaaccagtccttgaaaaggtgagcgtcaatgtttatggaccaattagtgaaggtaatccgaaatggttgaacggtgatcaagttgaaatcaaggatggggatatggtgatttatgttttaaaacgtgatttgcaaagtcgcgggatggcactatcctatcgtgggacgggcggcggcgtctatatcaaaggcattaatgggctattcgaatttgataaaggaccgttaagcggatggctttatcgagtgaatggcagttttcctaactattcttgtggtaattatcctgttaagagtggagatgtgattgattggatgtatacggaaaatctcgggaacgatcgcaacgcgcctcagggttaaaatcgcaactggtctttgatcaattaaatccaatcgtcatctttgcgtattacgtgattgcaattgcgttctcaatggtttttattcatccgatttttcttgtaagtgaattgttgatgatgattgcagtgaacttgcttgcgaaaaaccagaagaaaacactggggacattgcagggtgcattgttcatgatgctctttatcgtcgtgatgaaccctattatgaataatcatggggcgcacgtgattacgacgtttggtgggacggtgatcacagcagaggctgtcacgtacggttttttaatggcgctttcgctggcgatcttaatgctagtgtttgtttcctataatcagagtatgacgaatcataagttcttatatttatttgtgcggatttcaccgcaactaactttattaacgatgattacgatgcggtttgtcccactatttattcggcggtttaccaatatcaagaatgtccaaagaacacgtggtgtgcagatggaaacggggagtgttagagcccgatcacatgccgggatgcgtttgatggaagtattattgattaattcattggttgacgcactacaaacggctgattcaatgacggcccgtggttatgggtcacagaagcgaacgagttatcaacgttatcgatttacccaacgggatggttgggtattggcaagtcttgtagcaggcagtgcgctttgtttttattttgctaaacaggggattggccgcttagcgatttatccaatacttggctcgattcatttgaatcaaattggttggctatgtttggtgttagtcttattaattgatagtttgccgctattactagaaggatgggaatatttatggtggacattgcgcaaataaaacaatttaattttcagtatgcattggcaacccaacaaaatctgaaagacatcaatttaaccgttcagacgggtgacttcattacgttagctgggaactcgggtagcgggaagaccaccttattgcgccaactcaaaaaagaactctggcccgttggtaaacggtcgggtgagattattttcgagggccaaccgttagctgatttatcgcaagggttaagtgcgcagaagattgggatggtctttcaaaatccggataaccaattagtgatggatacggtcattcaggaactcgctttttcactcgagaatattggtgaaaagagtgcgaatattcaaaaacgaattgccgaattagtcagctttttaggtttccaagatttgctgtatgcttccgtgcatgatttatcgggtggtcaaaaacaactggtcaacctagcgtcggttttgattttacagccggatcttttactgttggatgaaccaacagcgcaactcgatcccattgcgaccaaagaatttattagtttattgcaacgggtacatgacgaactcggcatcaccgtgattatcagtgaacaccagttggatgatattttaccgctctctaatcaactttggttgatggatggcggtgagataacgtatcaaggaccggttgctggtggattagcagcaatttgggcgcaaccggcattgcgtgaattcgtcccagatgtgccacacgtctttttacaaaatgagttgattgcaccagctgatattgcggcattaccattgaccgttgtcagtggcaagcaattgattgagcggcgacaatggcagttaacacatactaaacgtgaaatagccacgaacgaccaagcaacaattctgcaggccaaacatgtgagttttcagtatgaaaaaaatgacccttatgttttagaccagctcaatctagaggttcataccggcgattggttagcgattgttggtaaaaatgggactggtaaatcgacgttgttgaagcttttgattggtttattacaaccgcgccatggtgcaatcaagttacaggggaagaagatcggtaagtgggcgcaagctgaacttttcaaaacagtgggttatctctcacaaacaccgagcgatcatttcagttatgatagtgtccgtcaagaatttatcgaacgggcgcggcagttaaaacgcgcaacaccagaacaagtggcagaagagatgctagcaaagctcggtcttcaaacccttgctgaacgtaacccgcaagatgccagtggcggcgagcaacaattgattgcactcgggattgtattgctagcgcagccgcagttactcttactggatgagccaacaaagggccttgatccgattcgcaaacgggcgttgggtgaattgttaacgcgtttacaagcggaaggcttaacgttgattatggcaagtcacgatatggcctttagtgcccggcttgctagtcagtgtgccttattattcgatgggacgattgtatcggaggaagaaccttatgcctttttcgcgcataacttcttctatacgacaaccatcaaccgaatgttacgcagtcaattgcccgaagccctgaattgggaagaggtgcacgcatgaaagctttaaggaatagttggaccacgtttggattggctttcttgattatggcgattttcatgttgtttatcgtcactttaaaaggacagcattttctaatcttcagttttatctgtttgattgccagtatgctgccattttattggcggtttgaaacccgggatattcgcgcccgtgaaattattttcatcgcggttttagcggcgattgcggcagtcactcgggtaccatttgcaccattgcccagtgttcagccaactagttttgtgattatcgtgtcggcattagtccttggtccagaatcgggttttattgtcggttcgaccgccgcgattgtctcgaatatgtttttgggacaagggccatggaccccatggcaaatgttttgctggggcatgatgggcgttacggcaggcttaattagtcgccatcagtgggcacagaataaatacttgctctgtatttttgggtttgtctggggctttatttttgggtggattatgaatatgtggtattttgtcgcatacgtcaatccactgacgattaagacttttattgcagcctatgtcgcgagtttctattttgacttggcccatgctttatcaaatgtcttttttattttcttcttttatcagtcgtggtaccgaatcatcagtcgctttaaagtgaagtatggtttgttcgcgacggaagatgagctataaaattgagccctcaccaaagtggtgggggctttttttaacggacatcatttcatacttgaaagttcacaatttggtcccaactgcttggtattctataaatatcagataagcatctcccaagtaagtgaatctgagcaagttaattttatgagacaattcctccctaaagaagtgtcttagcaacacccaatgagttatagtttaacggtagaaccaatcatctaaattgaaattcctcccaagaaaatcaaaagcgattggctattaaaagcgaagcgtaaaatgaatgattgatgtgggttcaatccccgcaactcgatgactgttgtgttaaaaaagccgcaaccaatttggttgcggcttttttgcgtttagtagaccaatccctgtttaccagtagtatggccagttaacagtttatcagtaatcatttggagattagcgaccgttaagcctgtgtagtgggcggtggtgattggatgcagaatccgcgcatcgattagccgcgcaatttgttggagaatcgccccttgactagtggtttggaattgatagtccgttttagtgaacatgtactcaaatgaaaatgaggctgatttaggcttaagcggtgcgagatcaagtggatgcgtattgccaacaatcgtaccgacttgtccaaacggtttaatcagccgtgcgacctcttggagatagctttcaatatcataaaggaccgcgatggcatcaaaggtgttatccggaagactggctaagttgtctaagctgctaggtgaatgataatccagcgggtgatcaactccgtttgtttttagccagtcgaaatgagtgagactgcttgtggcagtgacggtgaatccggcccacttggcgagttgactgagaattgatccaaccccaccggcaccattgataatcaatagttgtttgccacgattggcattttgttcagcggtaaaaccaagcttttcaaaaagtaattcataggcggttaacgaaacaagcggtaagccggcaatctccgcggcactgattgtactaggcgcaagcgcacaaatcgcggccggaacacattgatagtgttggaaactgccatcgatctgggtactgccggcatagaagacaacatcgccaggttgaaagttggtcacagtggcgccgaccgcttgcacggtaccatacccgtcatagcctaaaatggttgtggtgctagctcgtcttttaaggtcgacagggttgacgctacttgccctgactttgatcagtagctcttcaggtttaggcgtagggatttcactagacactgcgtgccaattatgttcggtatcaagttggatttggtgattagtggtcatgatgacgtcatcctttctgaataaaatggttagtctaagcctactgctaatcaccgcataatacaaaaaaagacgcccaattaagaacgtcttgagttcatttaaattgcttcaacagtaacttcttcagttggttcatctgcagaagttgtctgtaaaaattgatcgcctgcaagatctttgtagaatgccatataagttgcattcttatatggcgttaaccagaaatagccaatgccaagtgagaggccagctaaaatatcccaacctaagaagcttagttgtaagacgaaaaaccggaatttatgcccattcattaactcacgactcttagtgatacaatctaaaaagctaacgtcagcttgtggatcgttatctgttaagtccttgaagatatacgaagcttgagaataagcgtagcctttaatgatccccggaataatgaataacaatgcccaaaggaatgtaaataagctagctaaaattcgaattagaaaagcgcccaagaaataacgttttgagaagacactgaaagctcctttgagtgaactaaaatcagcatctttcgaacggagccaatctaagaaagtaaaattaatcccaagtgtaatgagccccaaaatgaaacttggaatttgaccagcaaaactactaccagacgaatggcccgaaaaagattcattggcagccattgatgggtcggtgtttgcgaagatggcaatcatgaccatcaagactgctccgacaataatcaccccaataattgatagcagagtggggatgatgttcaacgtaacggcctttccccaatgaccagcaaataatgacttaacttcttttttaagtgaagcgcgtgattgatactctctttccatgataattcctcccttactacgtagataaattatactattaattaatggctgaaatcaatttatttttaagtatctttgaaaggattgttggggattagttgttgaatgcactggtacatcaggcattctataaataatagcacatcataattaaatagtgtaaaatataaaattagctattttggttaaggggatgtatagaatgaataagggtcgattagaagcatttagcgatgctgtcatcgcgattattgtcaccattatgatcttggaatttaaaacgccagaaacaccggaaattaaggcacttttggaaaatggtccctacttttttgcgtatatggtagattgcaaatttaatccgaatttttggacaaatttgtcagcataacctgatacggtgtttgccagtcgagtattttaagcggtcgctggttaatttggagtaacgtcgtcgttaaatcttgagcactaatgtgctcaaaacgagtccctttaggataaaaataacgtaaattccgattaaagcgttcattactaccacgttcagctggcgtataagcatggcagtaataggtcttaataccatattgtgattcaagtgatactagcccactaaactcagtgccacggtccacagtaaagctgtgcaccggaccattaaaagtggttaggaacttagttagtgcttcattaacagtcgctgtcgtccgatcttttaaccggtatgcccaaaggaaccgtgatttgcgatcgattaaagttaataaaactgccttactatgcccacgaggaccaacgactgtatctagttcaaaatcgccgatgcgattacgttgattaatcatcatgggacgctgttcaattgatcgccccaaagattgattatatttggatcgttggtcaacgttacgccgttggcgtacgccatgttcaggtagatcattcaaggagaaaccaattctcccctgatttagccaattataaatagatttagtagctagtttaaattcgtgagcaatcattcctggtgaccagcttagacgtaaatggttgagaattttttgctttaacccatcgctcagcttagttttccgaccacatcgtgatcgcttgtattcggcatctgtttgtgctaattcagcctgataaggttgacatcgagataattcataagaaattgttgacggtgatcggttcagccgaacgcccatttggatattggacagccctagttcacaaaaggtttcgattttaattcgttcggaataggttatactagacaaaagatcagctcctaaaagatgggtttgtggtaaacaccattttaaaggaagctgatcttttttgtccgaacagcgttcggattaattttacaatctaccatcaagcagcaaaaaatgtgggcgaatgcttaaaagttactgcagccgtaaaaaatggggttattgaagcattaaaatcaattgattctcagcaagtgttggttcttcaaaggcgcccagaatttttagtcgagacaagtccgcaaatacaaattatttttactgatttgatcgtaagatgttgattataaataacaagcgcaaaggttaacaggaaggtattaatggtaaattatgcacatagtctgagtttaattatgagtaattaagtccagaggatccaactgctgaataatatgaacattacaaaaatagtacaagagaccaggtcagattgacctggtctcttgtactatttttatttagattaaatccaatctttacttgatagctccttctgtcacacttgtcatgacttgcttttgcaataggaggaacagaataataatcggaaccattgacaaaacaagtccggctaaggctaattgccattggctgtttgtttcaccgaagaaagaatacatcttaagtggaatcgtgtacatgccatctttattaacgactagtgatggtaacaggtagtcattccatattttcattgcattcaagataacaactgtacctgtcattgggctgatcgctggaaagataatataaacaaaggttttaaaaggataggctccatctaaagcagcagcttcgtcaagagtttttgagactccttgaaaagccccataaaaaagaataattgagaggcttactgataacccggtgttcataatgaccagactcgttctgttaaggaaattaactttgccaaaaagtgaaagaagcgggatcataattgactgaaaagggatcagcatagtgccggcacaaagatagtagagaattgaactgaaaggccctttaacacgagaaagagcataggcagcagctgccgaaaccaatgtgattacaatgacactggctactgtgataactaaagagttaaagaaactgcttgtaaaatcaagcgcctggtaagcagttttgaaatttgaaaacgtaaagtcccgtgtaaaccataacgggttttgaaaaattcccctttttccctttaaagcattgataataacaatgataaaggggtagaaccagaatagggcaatgattccaaaaagaaagccaagtaagattttagttgattttttcatcttctatccctcccgctttcttgaaagtgctaattgaataaaggaaacaatggttacacaaaggaaaaggataattccggctgcctgagcgtatccctgctggaagtttacaaaagcagtattataaatatacatcgaaatcatctctgtggagcggtatgggccaccatttgtaagtgctaagttttgctcatagagtttaaacgagttggcaagtgttagaaatagactgattgtaaaggctggcgccaattgtggcagcttgatgaaaaagaaaatctgggttgcttttgcaccgtctagaacagctgcttgaatggtattcttaggaattgcattcaagaaagaaatatagattaacataatataaccgctcatctgccaaacaaacagaattactatcccccaaaagcctgttgaagggttgctcaaccaacctttgaaaaagtcaagatgaaaagcagcggcaattgcctgaaaagcagaagtaaaaatgaattgccagataaaaccaagtagtattccgccgatcagatttggcatgaagaagatggttctgagtgattttgtgagtctgttgttgtgactggtgacgattaacgcaaaagccaaaccgactaagttaattagaattactgaaacaaaagaaaatttaactgttagccaaaaactctgcagaaaggtggagtcttgaaaaaggacttcaaagtttttccaaccaataaaagaagagcgtaaaccattggaatcggtaaaggaataataaattcctatcagaaatggtacgacaataatcaatagtataaagaaaactgctggtaaaacaaaagccagatattgatgttttttgataagcatttttatcactccccactttggatttccctgagctgtcgatatttagccgatgtttcctttttcaattctttccaagagatcccatttacaaaatagcgctgtatatatggcccaagtgcttggttagtaaagccattcgggtactgtttgtgaacaggagattgtgcgtttttggaagtgccgatccgataaatttgtttagaaagatcatcaggcagcctcgaaacatcaaagtttttagttgcaggaacgaaacgcatttcgttaatgattacgttctcagcttcttttgaagtatacatccagttaataaaatctttagcagctttttgccgcttgggatgatctttagtgattcctaaataccatgaggaaccggttaaaagacggtcagtaccatcatttttaacaaagaacggtaacatgccaagatttttttgcacgtatcccttttccagaccatcaagcgtcggaataatccaatttccttgaggtatcatagcaactttaccattgaaaaaaaggtcttggacagaaggatcatatttaactgaaagaatcggttgtacattatatttttttacgagatcataataatttttcatttgcctctcgtatttccaagggaaagttttgcttttgaaagctttgacaagattattgttgtacggcagagaagtaaattgtgctgaaacagaagcaattgaattggtatcagctccgttaaagccgaaaacggcatcgattccaatcttctttttttctgaattgagtttttcaaccgctttcaaaaattcagaatagttattgatctttgaggcaccaatcccagccttagcgaacacagctttgttatacgaccagccataagcctcaagattgactggaattccaaccatacgtttatttgaaattccaccgctaacaagatttggtactatgtttttacttgccttaagatcttttagattaatcaaatgatccttataccgatctatttcaggtagcccgccaagcataataatatctggagcttccccagaggcaaacttcgcttgtaaagcagcggccccaccgccttgacctgaagtagtaatttggatattgacgttgggatgtttagcatgatacatccgcgctaatttttgatattgtgcggttatttcaggcttttgattaaaaaagttaagtgtaatttttgaatttttttccttttgcgagctaaaactacaacatgttaagacaattaatgataaactcaacataaaagttagcttagcgattttaaaaaatctttttttcatgtcttccgccccgattcattgtcaattgtttgtcaagagcaccattctttcttacctaaattttatgtttttattatgaatcactgcagaaacaaaagcaaagaataaactcgaggaggcgtttcttatgagtaagattcaaatcgaacacctttataagcgttatgataatgcgggaaatgataccctaaaggatatcaatcttgagattgatgacaaggaatttgttgcaattattggaccatcaggttgtggtaagtctacactattgcgttgcttttcaggtttggaagaagttacaaggggaaaaattaatgtagatggaaagcgcttcgataatattccaccgcaaaagcgcagcattgcaatggtttttcaagattatgcattatatccacatatgactgtttacaataacatggcgttcaacttaaaacttagtaaattttctaaaagtgaaattgattcacgggtcaaggaagcagcacaaaagcttaatctcacagactatttggctcgtaaacccgcgcagctttctggtgggcagcgacaaagagttgctttagggcgtgcaatggtgcgcgcacctgaagtctttttaatggacgagccgctttctaatttagatgcgaagttacgtgtttcaacgaggcaggatattatcgagctacataagcagcttggaactgtaacgatttatgtaacgcatgatcaagctgaggcgatggcaatggcggataaaatcttgatcatgcgagacggagtggtacagcagtatggtaaacctgaagaactttatgataacccgcgtaacctcttcgttgctcgttttatcggttctcccagcatgaatattttaaagggtactctttcgaacaagggaatttttaattcaggtggtgtaaattatgaccttagtgaattcgtgaaaaaagaagttttgccaacggataaaagagagattgtacttggctttcggcctgagaaagtaacgcaggtaaaaaagtcaggagataatgatacagctcctgaaaattctgcacaaaaagagggattttttgtactttctgcaagtaaaaatctggctgaatacatgggcggccatacgcttgtctatctaaaaactaaagatggtgttaatattgtgactcaaacgcctaaaagaattcctaatgatgatagccacaaaaaattagatctttatattcgtaattctaatatttatctgtttgatgctaaaagcggtctgacacttcaaaatggttagctttaccagataagaaagaaaacggttaagttggagagaaagatttgcttaccataaaaaagcaaaaacgtactaatttgcaatttgcatgttaaagatataaacaaaggaaccgtatcaaaaatcacattttgtttcggttcctttattttatctgaaaatttacattgacaagacacctctaaaaaggtaaaacaataagcatgtaccagggggtgtcttgacactttgaaaaatttattaggaggactttggatgaactcaacaagaaaactagtaacggttacgggactagcgtggttatttgatgcaatggatgtggggatgctttcttttgtgattgacgctgatcggtttatcccactacaagaaattcacaatgtgtcctttaaaaatacggagaagctataaatttctagctctccgtatttttcttaacgctttatttgctggctctgttttgccctatttgttttattttagcctttagccaattttacttcaatgcaggcaaaaaaattcacagaccattaccattaattgataacgtttttcaaatcacctgataaatatgcttttatattatcaacagttatatgcaataaccgttctcttgtttcatatggtgcccaagcaatatgtggggtaatataacaatttttggcctgtaataatgggctatcactagcaatgggctcccctttaacaacatcagtggcgtaggcataaattttgccttcattcaaggcattcttgatgtccgcttcattagccaatttgcctcgggccgtattcaatataataaccccgtttttcattttggcaatcgtatcattattaattaaatcaattgtttctggtgtttggatcacatgcagactaagcacatcagattgccttaatagttcatcaaatgaaacctgctgaatccatgattcaggaacctttttaggacgatgattatagaaaataactttcatagaaaaagcgtgtcctattttagcaactttttgcgcaatatggccataaccgattagtcctaaagttttaacttttgacttatataaaacaggatgataagctgtcttcataatctgaagatatcgcttttacaaaaaggagtgattttatgcgcgcagtaacatggcaaggaaacgaaaaaatggaagtcaaaacggtcccggatcctacgattgaagaaccaaccgacatgattgttcgcatcacagcaacagctatttgcggttctgacttgcatttataccataacgggaaaccggtcatggaagaagactatgtggtagggcatgagcctatgggcattgtagaagaagttggttctgcagtaacgaaagtgaaaaaaggcgaccgagtcgttatccctttcaacattggttgtggagagtgtcatttctgtgctaatcatatggaaagtcaatgtgacaattccaaccctaatccaatgtttgatcaaggcgggttgttcggttttggtaaaatggaaggaaattatcctggaggtcaagctgaatacttacgtgtcccatttgcggattttacttcttttgttgttcctgatagtgatctaccagatgagaaggtattattcctatcagatgtactgccaacagcatattggagtgtagaacatagtggtatgaaaccaggagatacagtaatcgtattgggttctggccctatcggattatttgtacaaaaatttgccaaaatgaaaggtgctaaacgtgtaattgccgtagataacgtcgatcatcgtttgcagcatgcgaaaaaaatgaacggcgtagagatcgtgaatttttcagatgtttctaaagttggtagtgaattatatgaaatgactaagggtggtgctgaggtagtaattgattgtgtaggaatggatggtgtaacgccaatcaaagaaaaaactaaagatattcttacgccgcaaagcggttcttactcaccaatacaaacagcaagtgaagctgtgaagaaatttgggacgttgatggtaactggggtttatatgactccagcaacgaatttcccgttccaagatttcttcactcgtaatgtgaatattaaaatgggacaagctccggttatccacttgatgccgaaaatctatgacatgattgaaaaaggggagttcgacccatcggatatcattacacatacaatgcctttggagcgtgctgctgaagcatacgatatttttgacaaaaaagcagataataacattaaagtggtattgaaaccaggtatgtcttaaaaaaaatagtgggtctagcaaataactagctctaaatataaaaaacgcgatgaataatcataaaaaggaggaattttattatggcaaaatcagttgcagttttggtgactaatctagtcgaagacgttgaatatactgaacctgtagaggctcttaagtctgcaggacacaaagtgacaacgatcagctttgaaaaaggcactgttgaaggtaagcatggtactcagattaacattgataaatccattgatgaagtgagtcctcaagactttgatgcattgttcatcccaggaggattttcaccagatcaattacgtgcagaccaacggtttgtcgaatttaccaagttctttttggcaactaataagttaacagcaagtatttgccacggtccacaattaatgattcaaaccgggttagtgcaaggtcgtacaatgacagcatatttaactgtacaacctgatttgtattatgccggtgcacgcattgaagacaaagctgttgtgatcgatggtaatctaattaccagtcgcgaaccaaaggatatcccagcatttaatgatgccttcctatcagctttataatgttgatattgataagcattcaaacctatagcttgatgagtttgcctcttttaaaataaatttttaaacagttaccgttaaagtaacttattcctcgtgttagtaacccgggggatttttatatagacgtttttaaacccccgttgcgcaattaaactgaacttatatttctaaaacatactaattaataaaagcctagttactgaccaatttttggttagtgactagccttttattttattcataaggtagattgcaaatttaatccgaatttttggacagatttgtcagcataacctgatacggtgtttgcgagtcgagtattttaagcggtcgctggttaatttggagtaacgtcgtcgttaaatcttgagcactaatgtgctcaaaacgagtccctttaggataaaaataacgtaaattccgattaaagcgttcattactaccacgttcagctggcgtataagcatggcagtaataggtcttaataccatattgtgattcaagtgatactagcccactaaactcagtgccacggtccacagtaaagctgtgcaccggaccattaaaagtggttaggaacttagttagggcttcattaacagtcgctgtcgtccgatcttttaaccggtatgcccaaaggaaccgtgatttgcgatcgattaaagttaataaaactgccttactatgcccacgaggaccaacgactgtatctagttcaaaatcgccgatgcgcttacgttgattaatcatcatgggacgctgttcaattgatcgccccaaagattgattatatttggatcgttggtcaacgttacgccgttggcgtacgccatgttcaggtagatcattcaaggagaaaccaattctcccctgatttagccaattataaatagatttagtagctagtttaaattcgtgagcaatcattcctggtgaccagcttagacgtaaatggttgagaattttttgctttaactcatcgctcagcttagttttccgaccacatcgtgatcgcttgtattcggcatctgtttgtgctaattcagcctgataaggttgacatcgagataattcataagaaattgttgacggtgatcggttcagccgaacgcccatttggatattggacagccctagttcacaaaaggtttcgattttaattcgttcggaataggttatactagacaaaagatcagctcctaaaagatgggtttgtggtaaacaccattttaaaggaagctgatctttttgtccgaacagcgttcggattaattttacaatctacctattcaatataattgctgggaaaagcaaattaattcgatcgatattaaaaagatactgtaaaatattttaaaacactatataattaggaatcgtgatagtaattaaagaaggaaacgggttttaaaaatgaatttagttaataatgacctgcaagttcataataatgggtcgatgcaagccgcaacacaggcgactaattcgcagcaagcagctgagttttcgaatgctttagaaacagcacaacaaacgatcaaaatcaaaaagggcgatactgtctctgagttggcagagaaatatcacaccactacacaagctgttgctcaggctaaccagttaaacgatccggattttattctagccggacagaacttaactattcctggaagagcacaaataagtgcggctgcgcaaccgacctctatggtcaatgatgctggaacagtagcgtcactagcgaatgttgaccttgatgagaacgcttctgccagttctagcaacagtttagagccaacattggctggggcagaaaaaagtgcacgtgattatattattcagcatgagtcgagcaataactataatgctcgaaatggacgctatattggcaaatatcagctggatcaaaattatttgcatggtgatttttcacctgccaatcaagaaaaagttgcggctcaatatgtccaacaaagatacggcagctggactaacgcacagaaacattgggtcaagaatcactggtattaaattgatttcataacaagaacggggtcacatcacaaaagatggggctctttttttcggaaaaaatttctaaaatgacttaaacaatttaaaactggtccgatatatatatttgtaagcaacaaaatacaaaatatttggaggaacaaacaatgagaattaacactaacgtaccggcattaaacacatactcacgcttgactgctgccaatgcttcaaagagtgattctttggcaaaactttcatctggcaaacggatcaacaaagctggcgacgatgctgcaggtttggctatttcagaaaaaatgaaggctcagattggtggcttgaagcaagctaaacgtaatgcccaagatggtatttcattgattcaaacagctgaaggagctttgagtgaaactcatagtatcttgagccggatgaatgatttggcagtgcaagcttccaacgatactttgactaacgacgatcgtggtaaaatcactaaagaagttactgctttgcaaaagaacattgatgatatctctaaaaacacagaatttaatactaagaaattgttagatgggtctaatgataaatttactttccaagttggtgcaagtaaagaacaaactgctgaagtcaaaattgggagtatggatgctaaaacattaggtgttagtggtacttcgactcttgcgacagaacctggtactactgatccaaaaaatacgggagcaggagtccctgctaaagatgttgacttgaatactgctgatagtgcaagggactcaattgctcacattcaggctgctattgaaaaagtttcaggacagcgtgctgatctgggggccgtacaaaacggtttgaaccatacaattaacaacctgggaacaacaacagaaaatctttctgaagctaactcacggatcgaagacgttgatatggcagaagaaatgatgaactttacgaagtccaatattctttcacaagccgcaacatcaatgttggcacaggctaacgcaatgccaaacagtgtcttgtcattacttcagggctaataaaatattattggcacaggccgatcgtcgtttattcggcggtcggtttttttaataacaaggtggagtgagacgggagaaagtgagcactatcggaccttagcttcaaatcacgtattttgcgatgtgaagctaaggttggataggcagagctttctgtctcacgtaacctgactaagaaaaacaaggtggagaaaatgcggtatgaagccgagcattaagggactttaacaataagtcatgtctttagcgacttgttgttgaagttagttaagcgcaagcttttgcatttcgtaacctgactaaaaacaaggtgaaggcatatcggggacttccaagcattgtcggaacagctgatttcgaaacgttcttatcatcgaagtctgttgcttagataagccgaaagaagttgacccgcgcagcctgactaaatcaaaagagaatttaactagaaatattggagtgaatatatgtaagacacggaaagaagggacaggtaacatgcagatcaataatattccaccagtcgaacccacgccggctgttaataaaatccagaaagttgcgactgatagttatgaaatggatacttcattaatggatgaatcattcattcgtaaagatcaggaaaaatatttgggtaaactttttcagttaaatgatggtaaaaacgttaaagaagttgaggattcagccgataatgtagtcgtagacccgcaagaactgcaaaaagcagttgatacattgaataaaaagttactgggtcgcgattttaaactgaaattcgaaattcatcagcggactggacggcagtacgttgaaatggtggatatgcaaagcggcaaagtgttaaaggagatcccttctcataaaatgcttgatgttttgggaaaaatctgggatcagatgggaattacggtcgataagaaaggatagtgacgtaaatggctgatattacaagtgctacctcagcacccaatgcagggctcagctttttgggccagtactctgggatcacaacggatgttgttgatcagttgattgaggctgaatctggcggtaaaacgctgttacaaaataaagttacgaaatataaccaggaaaagtctgcctggagtgaaatttcatcagctttaagtaattttcaaactaagcttaaagccttgcagaataatgacagttattattctaaaattgctaaaagctcgaatgaagatcttgcaacgatctcaggaaattccgacgccaaaaatggcggtgattttgaacttttggtcagtcaattagctaagcaaactaagttgactggtagccaggtcagcgcagcagagacgaatagcactgatcttaacttgaacggtaaactgacttttgcttatcaaggagaaaaaactgacgatagcccagaaactgttgatattgatattacagagaaggattcactactcgatattgctgataagatcaataaagaatcaaaaaatattggtgtttcggcggtagtgatcaacaaacgcctagttttgacgaataacaaatcaggtgctaaagaaacaacactggatcaaacaaagaatacagctactttagctgccttgggcttaaatacttccgctgatctgggtcaggctgccaagtatagcctagacggcattgacatggaaagtgatagtaacgtgatctctgatgcgatcgatggtgcgacggtcaccttgaaaaaagagatcaagcctgaagatgccgtcactttatccttgaagaatgatgattctaaaacagtcaaggccgctactgattttgtaacacaatacaataacttaatgagtttgatcaaaagtaacttggatgtgggcaacccgtcagcttccacagcggaaagttcttcgactaatgttcaaggtaagctggttggcgattcgaccttgcaacggctacagtcatctttgagaaatatgatcacacaagccgataaagacaatggcgctagtctgagtccttttgatatgggcttttccgttgacaaggatggtgttttgagccttgatgaagacaagtttaagtcacagttagctgattcaccggaaaaagtccatgactttttctatgttcaaggtgaggacagcttcgacgaaagtacggacacgggctatactgctaaattaaataatctagtcaatgaatttattagcaacgatgctactaaaaagggaatcattactaataaaagcgatagcattgataagatggtcaaagacttgaactcgcagatcgatgacttcaccgcgcgtttggccgataaacgggaacaatatattgcacagtttacccagttagactcgatcatgatgcaagctgattcacaaatgcaatacatgcaaagccagttgggtgtagatcaacaataataacgatcataaaagaggagcagaagtttggaaaaacgagaagttgaacaaatattaacgaagttaaagcaaaatatgaaagactgggaccaaacaactgcttccattctagctttactacaagccaatgatcaattattgactcaattgcaggaaactgagtcaaacttgtcagcgcagcaaaaagtggttttacaacaagtaatgtctgaatatcagagtctgatgcaagtaacggcgaaagagaagaaaaaagtgttgcagcaattaaagagtttagatcgtcaaaagtcttccaggggtgggacttaccaccaaaaaattaccgatgggacgatgatcgaattagaatattgatccgtgacttcaagctggaattacaaaatagttaaattgatggcgggggaattgaataaatggatgtaaaacaggcacaaaagcaacgtaatttttatttgaagaatcaagtgttgaccgcttcgcctaacaagctgatcagtttattgatctctgggggcatcaaagcaatcaagttagctgaaattgcattgaatcaaaatgatatggtaaaggcaaatcatgaattgcttagagctcaagacattgttgatgagctgaaattttcattagatcattcggttgatagtcaaattacgacagacttaaatcgtttatataactttatcacgcaacaattagtggccgctaatgtcagcaaagacaaggaaaagctgccgcccattgttaaattgttagaagaattattggaaacttggaatgaagttagccaaaaacaaaatatttagttgaaacgactacaggcttgttaattctgtagtcgttttatttttttggaaatttttttaatgagtttccttaaatcttttcaattttgtccgataaataaaatggaagagtgaagaggaggagaaaaaatggacctgtttttactgatcggtatctgtgccgcgttggtcatcgtggtggcagcgatgattttaaaaggtgctagcttagccatgttatttagccccgaggccatgatgattatttttggggggatcattgtagcgctgatcaatacatatccgctggctgacatcaaacgtttaccaggaattttcaaagtattatttcaagcaaaaaagtatgattaccgcgcaacgatcgataaattagtagaattatcaaatgttgccaggcgtgaaggcttgttggccttggaaacgcctgttaacaacttagatccagaaaaagatgcgtttttaaaacgcggcatggagatggtggtcgacgggatcgataaagaagaaatcgaagaaatcatggaaaatgagatctcatcgatcgaggaacggcatgctaaaggaactgccatgatgcaaactgccggcagtacttcacccacacttggtgtgatgggtgccgtgatcggcttgatcggtgcacttggacacttagataacgttagtgtattgggagagtcgatctcatcggcctttgttgcgacgttatttggtatttttatgggatacttagtgttcatgccttttgctaaaagactgcaacgtaaatcagaacaagaaattcaaaatttagaactgatcatggcagggacattggcgatcgaagaaggagtttcagcgaaaacaatggaaaagaaccttgaaagtatgatcagtgaaaccagacgaactgacattgaaaaaaatgagtagattggaaagaaagtgggacaggcatgcgtaagaaaaagaaaaaaaatgatagtgatagtgaagcctggatgctcccttattctgacatgttaacattgctacttgccctgtttattgtgatgtttgcttcagccaaggtcgatgatagtaagttccaaaaaatcagttcagagtttgggtcgatcatggctttgtcaccagagcaacaaaatcataaaagtgcggcagtcggtggatcaaacgcaatcgaacttgattcaccatcagtaactaataaagaaaaagatagtcaggcaccggaccctaaaactaaaaaagcagcgatcaaacaagaaaatggagtaaagggcagtatttcacaacagaatcaagaacagcaattaaaagaaattgctcatagtttaaacgaaactgctgcagagatgaacttgggaaaaaacacaaaagcttcactcaagtctgacggactacatttaaatttggatagcaatattttatttgacagcggtagtgcggatctgactgccgattctgctgcagctttaaaggaactggggccaaaaattcaacaactaaaagaaaatgaggtcattattgctggttatacagataatgtgccacaagaatcgaaagactatccaagtaactgggaattgagtgctgctcgagcagtttcagtcatgcggttcttcgtgcagcaaaaggcagtgacggaaggcaacgtctcaattgaagcttttggtgaaaataaccccaaagcaactaacgatacatcagcggggcgtgctaaaaataggagagtggaactagtgataaaaaaataaactgagcaaattattattgaaaatagttgaagtacattttcaatatggaatagcgaaaaatgaaaattgggtgggtaattcggttattcagtaagaaaatctcattttcttcgcaaaaattatttcaacaagaataatttttgaaatataatataagtaaaaaatgccaaaaaaatgactaatttttaaatttgtatattaacaagcaaatttattagacattctttaaatttatatataaattagcaatcaaggcgctttcaaaatttttgtggttcagaaatggcatacataaatgcgatagttcgccttttttagtctcttgaaatgtcaaattaagttagaaataacatagctgtttatctgtgatgttttccatgaatacctcaattggtgttttataatttaatgattttcttggaatacgattacgccggctactgacttgttgaactaaagcatttggtaaattgcgaaaatccatgctcttgttgagaccatctcgtctaattagtccattattattttcgtttaagccacgctggttaggagccccaacttcggcaaaataagtactaatatcatgcttatttgcgatttctttccaaccagtgaattctttaccattatcaaaagtaattgacttgaaaaggtgttttggctgttgggacaaccattgattaagatgtttattaacgcattcagccgatttttgttggatgtttaaaatgatttcaactttggagagacgctcaactaaggtcataactgcaccttgatgtgctttgctttggacggtgtctgcttctaaatgaccaaattcatgttgaaaatgaggataatcctgatagcgttgataaatacttctgccgagtcggccagctttaccacgccgttcaacgtaaccatttggatgccttttacctttcattggcaacaatttcacattgaaaacacctctttgaaaaagtcggtataaggttctcatactacaactgatctgtatctcagctcgaacaataatcgtatcaggggtccaacctaatgcgagtttctgcttaatgtatttggtttcatcttctggtaattcaattgcttttcgaccgcaatgagttttattaactcgatgattttcttgaaattgactaattgaattaccagcatctagaaaccggtaaacacgataaacggtttcgctggaacgtttaagagctttagcggcatgataggctttaatatcttatttccaaaagttatatataaaggttaattcacatgtggtaagatgtttataagtcatttgtggttacctctcttttgattagggatattcaaaagtctaccacaaatggcttttttatttctaacttaattttacaaacgacgagttaaaaaaataattaataaaataattcctgaataattcatactttgttgcgtaaaggtaatttgccccttttaacgtttaatttagctcaaatttaatccgcaactatttttgagtgtatttgagctatttttaagacaattttatttttgattggtgtcaaaagagtaaactactcccttgatcgtacttaaattttttaaattgtcttttttaattactagtgagctgaaattcttgaatcctaaacaatgtttgccagtataaatcatcaaaaacattggtactagaaagatgcagccataatttacgtgcatgttgggtgactctgccggccaaatgaaagagcttgaaacgtaaagtggcgctcgttgcgttccctaattcagctgggaaaaccagttttttcatggcttgaactaagttataagccacaccggcgagtaacattctaaactggttagccgtaaaactggaactatccgttttatcaaaggcaaagccacttttaacttctttgatcagatcctccatggctccacgttggtgatagagttcaaagacgtcactggcaaaagccagctccaagttagtcacgataaattcgtgtttaaagagtagctcgccagcagggcgagttgatttaatgatcacggggtaagcgcgaccccaagtgtccggttggtaatctgtcaaacggtgccactggacatctttttcggcgaagtcttccccaggttgccccacatggatcaagtgctcggcgatccgttgtagttttggattagccttgagacggatcgtaaactttgccccagcttcttcacaggcggcataaatttctggcttggcaaaacccgagtcagcccggactagtacatctaaagcagcgtattgtttcagtagcggtttcaaaaaagcttccgcatttttggaagtgtattcgttacctggccgtaatttagctcctaagagacaacccgaaaaaccatcaaaagccaacaggggatgataaccgttcgtttgataatgggtgttaaaagcactgcctttctggtaaccaaatgtatcggaatgagtcgaatcaagatcaatgatcagttgacgttgcttcttttgtgtgatcactaactgcgctaacttggcgactaattttgtgatcccggccaagtcgtctgcggaaatttggttgatatagcgtgaaagagttggttgcgaagcaactaaattatctaaaacaagctcaaagctcatgtctgcggtcagtttattagcggcagtatcgtcgaaataacccgcaatcagctgaatcaacagttgtttaaacagctggttcttatggtacctatagaacttgcggttttccttaaaatggagagtttctttcaaaaggcgcttaaagtggatctgatgcataaattcagccactaaaattagacccgcatcgttagataaatgaccaccattattagaaagaaccagatttttgttgaagttaacggtttgttgttgtaaagtcgacatatggagcactcctgttctgtgttggttttggtcgacttaacaatagcacaggctgtgctctttttgtatacgcaattaaacacctaaaaggtgttggtttggatcacggacaaacaagatgataacaggcaaagaaagaaaaactgttaaagatatgaattattcaggtaattgaaaataacttaaaaattaacttgattgtgagtatgttaacagctaaaattataatgctgtgaaaaatatagaaaaagtttgataaaggggacatcttggctgcaagcaactactatgaaaattgaaatataaaaagtttgaaaatattagtgttaaatcaaagaaaataggtgtaattaattttggaaaatacatatggcttaatgaaagaagctttaaacgtttcttctaatagagcacaattgaacgcaaataatattgctaatgtcaatacgccgggtttcaaagctaaacgaatcgagtttgaaagtgttttgaataatgctttggaccaagaaacacacctaaaaactacatctaaaatgcatatgcaagcaggcggggcaattgaaccgcatgaaagcgtgcgcaatgatacggctgttaaagaaaatggcaataacgttgatttagatgttgagatgttaaatcaggcacaaaatggtttgaattatagcgcgttgacatcacaactcaaagggcgttaccaaatgatgagttatgttttgaatcattaatggtaagactaaattggagaagaggagatcagagtgagtatttttaatggattgcagatcaatgccagcggcttagccttagagcggttaaagcttgatacgacatcaactaatattgcaaacgtcaatacaacacgaacgccggaaggtggcccgtaccgccggaagtcagttcaattcgctgaaaatttacgtcaagtcgaagcagacaatggaaatatcatggaagccaacaaacgacagagttccggtgtaagagtgactggcattgcacaggatcaaactgagaagttgagttataaaccagatgaccccgatgccgaccaaaatggttatgttcatttaccgaatgttaacttggcggatgagatgatcgacttgatccaatcgcaaagatcttacgaagcaaatgttgcttcgagtcaggtcaataagcagatcttgagtaaggcactagaaatatcagaaaattaggagagataaaatggcacaggtcaatggtattaacggcttaaataattatgctactcaactgcgcaaagttactggactcgataattctgatcagacagttaaaggcgccggtaaaacattcggtgattatttggatcatgctttatccggtttaaattcaagcatgaaagttatggatcagtcgactaccgatatgatcagtggaaaacaagatgacttagggcaggtcatgatcaatatgactgaaagtcaattaactttacagactgcagttcaagttcgtaataaagctttggaagcttataacgatcttaagaacatgcagttttagtcgtgtagtgggggcttggaagtggataaagtaaaggacttttttggaaacttaaaagacaaatggtctaatctaaatcgtttagtaaaaattgctatcatagctggtttgatcagcatacttgctgctggtgggatcgtatattatctgaacaccagagttgagtatgccgttttgttttcgaatttaagtgacgcagacgctgggacggttacgaaagatttggaagatcaagacatcaagtacaagttaaaagatgatggtaaaacgatcttagctgataagacaaaagtcgaccagtatcggatcgatatggccgtcgataacaaactgcccgatagttcacaaggctatgagttatttgatgataccagcatgatgaccactgatgaagaccgtaagatcatgtatcagcgggcaacgactggtgagctggaacgttcgatcggttctttaaatgctgtcaaaaaagctaaagtaatgttaacgatgcctgatgatgatgtctttagtgatgatgccaaaggaaaaaaagccaaagcatcggttgcattgacgttgaatggcaacacgatctcaaattcagcagttaaagggatcgttgagttgaccacaggtgccgttaagggattaacagccgaaaacgttaaagttgttgatagtaatggaaatgtattggctgatgggaataatgacaatgatgatctgacaggtgcgaacagtaaatatatgcagatccaaaaacagtttgaaaaacaacttgaaaagaagatcacacgtgttttgggcccattagctgatggaaacaaaatcagcgtcgcagttaacgctgaccttaattttgacgcactggaacgcaagactacgaaatatagcaatccaaatttacggagtgaaaatgttcaagctaatgggaaccaagaacagatccaacaagcacagactggtcaaaccgatgataatgtctctaacgtaactggcgataataccgataatggcgcttcatatagccggacgatcaataatgaattagatactgatgtgactaagcaagttagcgcaccgggaactgtgaagagattaacgacctctgttgctattcgtggagatgttagtggggaccagcaggcgcagatcaaaagtattgtgcgttcagccatcggttacgataaggatcgtggtgataaagttactgttcaagctttagatgttccagacacgacaccaaaagttcataagactaagacggtgaagaataatgtgccgtggtggtacatcgcccttccgatcggtgtcatcgcaatcgctggtatcgcagcctttttgatcattcgcaagaaacgccaagatgacgatgatgactactacgatgatgattatgatgtcgatgtaactgatgattcaccacaacctggacctacttcttcagcgaatagtgagccgttaccggaagcaaaacaagaggaaaaagcagtacctctgcaggaaaaaccagaagtcaaagaaagacaagctaaggataaacaggctaaagattatgcccagactaatccagcagttacagctgaattgctgaaagcttggatgaaagatcatcactaggaggggaaataagagatggctcaattgagtggagtaaaaaaagcggcgatcttaatgatctctttagggtcagaagcgtcctcccaggtaatgaaacttttacctgacagtatgattcaaaaagtcagttatgaaatagctaatacagattatgtgactccagaagaaaagaatgctgtcatcgatgaatttgtcgacactgccacagccagacaatatgttttggatggtgggatcgactacgcaaaggatcttttagttaattcgttagggccgcaacgagccaaagaagttctggatgttttgaacacgatccagttgcgggaacaaccgtttaacattgcccgtcgtgctaatgagcagcaattagttaatttgctagtagaagaacatccacaaactattgctttgatattgtgttatatgcaggctgagaaggctgccagtgttttgtcagaatttccagatgaattgcaatctgatgtagctgaacgagtggcaacgatttcggccacttcaccagaaacgattcagcggatcgaaaaagttatggaagataagttttccaatgtggttgatggtgaacgtgagagtatcggtggtgtcggcgcattggtcgatatcttgaattcaacgggccgcagtactgaaaagacgatcttggccggtctggaaagcagacagccagaattggccagtgaagttcaggccaacctatttactttcgaagatattactactttgcaagcgttggatgtgcaaaaagtattacgtgatgtgacaaacgatgtattagagctggccttgaaaggcagcgatgatcgtatcaaagactttatcttcggtaatatgtcacaacatgcggttgaaaatatcaaagaagatcttgaatttatgggtccaactagattatcagctgtcgaagaagcacaacaaaaagttgtcgcagttattcggaagttagacgaaagaggcgagatctatattggtcgaggaggtcaagacagcattgtctaataatattttgaaacagcaggcaatgcccctgcatggtaagaaagttggtataaagacagcagattttgttcctcaaataaaaaagcaagatccacagttaacagctcttgacgctaaattagcacatcagacggcagcttaccagcaaaagctaaaacagctgaaagctgagatgttagtagatgcaaaacaaaaggcagcagaaatcaagcaagaagcctatgattctggttatgctcagggaaaaaaagatggataccaggaggctgtgacaaaaggacaacaaaaaatggcacctctagtcaagcaggcacaagataacgtggagcaaagtctggcagagtcaaaacagtacctggcagaaaaacaggatgagatcacttcttttgcagtacagttggccgaaattattttgaagacgcagttggaactaacgccagaaaagatcactgcaattttgagtccattattattcgaactcgaaaaaccaaatgaagtattgatggtctgggctaactccgcttatcatgaatcactgaccactaagttagagcaggtcaaagaagaaattcctgatctgcgttacataatttttgatgatgatagtttaaatgctttgcagctgcgtgtcgaatcaaacgaatcggtagttgatattgacattaaaaaggaattacaaggttttctggaacaattatgaggtaaataaatgacaaagataaagatcccctttaaaaattatttaaaccaagcgaaaaaatatcctttttattcggtatacggcaaagtcagcgaagttgttggtcttgtgatcaaagtcgaaggtttgcaagccttcgtcggtgaagtctgtgaggtctatgcgaaaaaagcgggaaaaaagacagtgacggaggttgttggattcgttaaacaaacggtcttattgatgccattagatgagctagaggggatcgcgccgggttgcctagtggctgcaactggcaagacacttgaagtcaaggttgggccaaaaatgctgggacatactttcgatggcctaggacgtccattgaaaggttccaagcttgaccagtctgaaatggtcgggtatccagcgatgcaggaagccccagatccatttaaacggcaagacattgaaaaaatcatgccgactggtattcgagcaatcgatggattattaacggttggcgagggacagcgagtcgggatctttgccggcagtggggtcggtaaaagtactttgctggggatgatcgctaagtattgtcaggccgatgtgatcgtgatcggtttgatcggtgaacgtggccgtgaggtgagagaatttatcgaaaaagacttgggtgaaggttatgctaagtcgatcgtagtgtgtgctacttctgatatgccgcccttagttcggctgaaaggtgcatatacggccacggcaattgctgagtattttcgtgatcagggcaaaaaagttgttttgatgatggattcggtcacacgttttgcgatggctcaacgtgaaattggtctatcaactggggaaccgccaactacccggggttatactccttcggtttttgccgaattacccaagttgatggaaagaagcggaatgtctgacaagggttcgatcacagcattttatacggtcttggtcgaaggtgacgacatgaacgaaccgattgctgatgcagttcgcgggatcttagacgggcacattattttatcgcgagaaattgcggcccaaaatcattatccggcagttgatgttcaacctagtgtcagtcgtttgatgaaatcgttggtctctcaagaacataatatccatgccagtgaattgcgtgaaaatttgaaaacatacgctgatgcgaaagatttgatagatatcggggcatataagagcggaacaaatcctgtgatcgactatgctgtgcagctgcacaaaccgatcgatgactttttgcaacaagccgtggatgaattttcaagtttcacagatacagaggagagattgcagcagttgtttgcttcgaataatgttttaggtgacggtcggatcactgcagaagggtagggagatcagggatggaagaatttaatttttcattacaaaaagtgctggaatatcgtttgcaagttgaagaccaggtcaaggggcattttgctgaagtcaaccgcctggaaaacgagaaaaatactgaattggatcaagtcatgcaagaaaaagacagcatgatggaaactccacaattttcagttagcagaatgcaagtcacacgacgctatattcaagctcttaacgaccagatcatgatttgtcacgatcaactgttggggttgcaagcacaaaaagagcaaattcgcagtgaattgatcgaagcacagaaacaacggaaaatattagagcggcttaaaacaaagcagcttgcacaatatcaaaaggagctagcccatgaggaacaaaagcagttggatgattttcaccggccacaacaaaatgtaaatatcgcttgaccttgacgttaaagcaagggtttgaaaggaggacaatgaaatgcaaaaggtagttacaggtaagaaaattgctggtttgcaggttgctaaagccaagccaaccaaaaaacaaacggggaaatttcaggcttttttagcacaagataagccggaaattgcggttaatgatgataaaggtttcagacaaaaaaaggctaaaaatcgactagagacttctaaagacatgcttaacatacatattaaaactactgattcgcaaacaaaaaaagagctagagcaagtcttgcaaattgactcgaaaacgttccaacagttagtaaacggtacagtttctttggatgacttggtcaagcaaggaaaagtccaaatatcgcctgatttgctggaaggactcaaggaattagttagcagtagcgatcatttgaaaaagcaaaatattttactagagatcgagcatgaccaatcagaagcagtcgaaccgctccaagaaaatgataacgccggaaaaaatgaaaaattacctaaggatgctgctcctccactagacttaaagcaagccaaggcaggaccgatagccgaaattattgcagacaatgacgttgcaccacaacaaaccgagcaatttggcgaaaatccggcacaaagcgtaattgacttggatgaaatgtctgcaacccagcaagcgaccttgaaggaacagatagcaaactttgttagtatggtaacttctaagtcagctggtgaaagccaggctattcaagaatctaactcgacaataaatctggttgtgagttcggacacaaagatcaagcaggaagctgctcagcagactgatctggaagttgagtcggttcaacctacaaagatcattgagagcccgttagtttctaaagcagggcagctgggtaaacaagaaattaaaacatcacctgaagttgcagcgatggcagacgagctttcagtatcgtcgctaaaacagtcagcggaaattttatcagttagttcaaaaatcttgatcggtacgaaagcttcgctagcaggacaaaaacaagcagctgaaatcatagattttagtgagcttacagatagaacgtgtatggtaagcgtagttgaacaaaaaagcgcgacagttacgcaagctaatgtggggcaaaaagtaacaacgataactagaccggtcgagcaggtcgtgagaaatttgcaaaaagcacttactccagtagttgagaaaagcttgttatccagtaagggcaatacccagagcatagtttttaatttgaaaccggctaatctgggtgagatgaaagttgcggtaaagacgaatgaacaggcagtcagcctagaatttgaagttcaaaatagtactgcacgtgatatgttacaaaaaatcacacataaattagagcagatcatggagcagctgcagcttgatccaacgactaaaacattgaaacaagttgaaactgtgagacaaacggcggaaacttctgaacttttaggcgagcagcgagatggtccagctggtgatttcatgcaaaatgagcaagaacagcaacgccgatttgcacgttcgcacaagacgaggacacaagtggtcagtgaagaacatttgccaggcgaagaacaaatcaagcacggaacgatcagtttgttggtttgagcgtctcagagtatgcgtgatcaaaggaggaatatatttcatggacaatttaagcggtgtacaagcaaacagtcttggcagttcgagtgagataacaaaaagtacttcacaaaacggtgctgctaaaaatgctttgggactttcaatggatgattttttgaagatcttagcgacatcaatgtctaacccttccatgaccggagatggagattccaatagcagtggtacagatcatatttcacaaatggcacaatttgctaccttacaggaattaaataatatgtcgacaatgatgaataattctttgcttttagggcagcaacaacaagctttcaatttaatgggcaaggatgtcacagttgttgatgaacaaggcaatgaaaagcaaggaagagttgataaagtcaactttactggcggtattgccaagctgaccgtcaacggtacggaatatgaaatgggtgccatcaaagaagttagagaaccaaaagattaaaaaatagcaaaatttaaaaagatgctacacaaataggaggaattttaaatgttacgttcattgtattcaggtgtttcaggaatgaagagtcaacaaaccaggttggatgttatttccaacaacattgctaatgcgaacacgatcggcttcaagtcaagccgtgctaacttttcagatattttaagtcagacaactgcgaatgcttcaggaccacgtgcaaccgttggcggtattgatggtaagcaagttggacttggggttcaggtcggtgcgatcgatacagacatgggtcaaggtattcaaaacacgactggccgtgctttggacttatatatcaatggtagcgggtttttagtatttgagcgagatggtaataatggtcaggtttattcacgtaacggtgctttgaagatcgatgctaatggcaacttgactaatgctgatggtttacgtgtgatgggctatgctcccggacaggaaggcggagcgttaactcgaattacagtaccagctcaaaatgcagctggtgaaaagttagttgaaggtcacgtttcaatcggtcctgatggcaaagttactgcgcgttatggcgcggaagatgaagtgatcggtacagtgtcgattgctacgttcagtaatccagccggcttaagcaagatcggtaacagcacttatgaaatatcacaggattctggtaatgccaataatttagtacctggtacagatgggaccaacactttattagcggggacattggaagattctaacgttgacttagcgcaagaattctctgacatgatcgttacaagcagagcatatcaggccaatgcaaggagtatcacaacgtcagacgagatgttgcaagaattgatcaacctaaagagatagtgagcgaaacaacgcggttaggagacgagcaatatcgggtttagacatcatggtgcgtttttggcaccgtgatgtttaaactggataggcgcagattcctgcgttgagaaactgtcctagaatagtgagcgaaacaacgcggttaggagacgagcaatatcgggtttagacatcatggtgcgtttttggcaccgtgatgtttaaactagataggcgcagactcctgcgttgaggagctgtcctaagatagtgagcgaggtaagccgggtaggactcgagtactaacggacttctaggccataatgcgttttttagcattgtgtgtggaagttggttagacggaaagtcctggcttgaggagctgtcctagaatagtgagcgcagcaatttgatcaaaaggggaaaaagaacctgtaaggtaaaatttttattttatgtacaggataaataatagggggcaggttcatgattttgttaacttcatttaaaggaaaagaattttatttgaacccagatttgatctatcgaattgatgaaaccccagatacagtaatcacgcttgtcgatgggaaaacgctggtagttagagacacagcgtttgaaattagggaagcgatcatagaatatcgtcaccgaattttttctggtgagaatctttttgaagggaataacgagggaaacaatgaagaagaatgaagaagtagaaacaactgaaactaaagcaggtggcatcaaatggggattgcttattgttttagtagtcgttttagcatttggggctagtgctgccggcacgatcatttccgacaagtactttaatagtcaagacgcaaaacctaaagctgaaaaagtgcaaacaggagctgccatttctaaaagacagcgtctggtaaacgtcaaaaagtttattgttaatttggcaacggatgatgcagctgatccacaatatttacgcttaaaggtctctttgttagtggctgacgatgatcaagcaaaagcattaaaaaaagacatgcctttagtgcgtgacagcatgatccgtgttttgaaaccaaaaagggccgcagatttattgaaaaataatcaaagtatcgatgaggtcaaagaacaagtcaaagaggctattaataaaaattatggcagttcaatagtgcaagaagtttatgtgacagattttgtgatccaataagttaaatcatacgaggagtattcaaatggagttaacgttgtcgttgatcaaaatggtggttggattaattatcgtgatcgttttgatcaacttatttttaaaatacttacagaaattcgttgctccacaggatcggcaatttcgagttatcaagaaaatcccagtttcaaaaacttccgcacttgggatcgtgcaagtcatcgagcgctattacttgatgagcttggcagaacaaggcagtacggtgatctctgagttatcaaaagaagaggttgagcaattatttaccagttcagatgatcaagcgagtgaaaaaatagattttgcggccattctcaagcaaaagacgatcaagctgcagaataagagaaagaagtaatgactacgaaaaagcaaagtaaaatactgagcgggttgtccttaacggcttgcttgttccgaccagtttcagtgcatgcagctggcctcgatgatgtttctcgtggcattactgatttgatcaatagtggacagagcggaaattcgtcgcagatcgttaatgtgtttgtgatgatgacgattttatccgtggtcccgctgttgttagtcatgatgacatcttttacacggatcatcatggtcctttcatttactagaagtgccttaggaacgcagcaaaacccaccaaatcaagttttgcttggcttggctttgtttttgaccctgtttacgatgaagcctgtttatacagatatctataaagaagcgatccaaccttatagtcggcaggagatcactgaaaaacaagcattcaaccgttcagaggtcaggcttaaggaatttatgggaaaagaaactcgaaaaaaagatgtcaaattgttcttagatgtttctaaagacaagcatcgctataaaaatgtggagtcagttccgctaacgacacttactccggcttttattattagtgagctgcggacagcctttagtattggctttttgatatttatcccgtttttgatcatagatatggtcgtctcgagtgtgctgatggcgatggggatgatcatgctgtcgccggttatgatctcattgccgtttaaattattattattcgtgatggtagatggctggtacttgttagtcgaatcgttggttcatagtttcagttagagggggagcttaatgtctatttcattagtcttgacggtcatgcgtgaagcggtgatcagaatcttagtagtttcaggtccaatcgtgatagttgcgatggtcgttggtttggtcattagtatctttcaagctacgacccagattcaagaacaaactttgagttttgtccctaagttggtcgcaatttttgtgaccctgatcttggctggaaactttatgatcacaacgctaaaagaattcacggaatatatcttccgcttgatctcgggggtgtgacgtcagtggccgaagtacaattagttagtttggtgatttgccggatattttcttttatggtcacagcgccgattttatcacaaagaagttttcctaatactgctaagctgatcgttggggggagtttggtagttgctgccattcctttagttggcaaggtcaaggcgatgagtgtggttatcttcgctttggcggctttaaaggagactttattggggcttgccatgggctatgttagtcaactggtttttcaagctgtgatcatggcgggttccctgatcgattttcaaaatggtttttcgatgggccaggcttatgacaggacaatggaagtttccagttcacaatttggtcggatgtactactggttggcactggcagttttcttcatgttaaatttgcatctggaattgtttcgcgctgtgatgctatcttttacgattgttcctttaggaaccgccactttgacgaatgcaagtgttaagggtgtggtcattttgactagtaagacccttgccatggcttttaatgttgctgcacctttgatcattgctgtgatggtgatcgatattgtattggggatcttgtcacggtctgtgccgcaaatgaacgtgctgatgttaagtttgtctcttaaatctactgtaggaatgatcatctttttgatcatgctgccaaatgtcgtggaattgttgggaaagataatcccacagtcatatgagtatctagtcgagttcctgcgttcggtaggtcaggcatagtctgataaaggaaaggttatttcatggataaagatggtaaaactgaaaaaccgacccctaagcgtaaaagagatgcgcgcaagaagggaaatgttgctagaagtccagacttaacagctgctttggctttattgaccttttcgtttatctttattcctgcttggcaatttggattaggcaagttttttccttatatgacaggctttatcgagcagttggataactaccaggtcttatacgcagacctacctaaggttggcttgcaggcgatcttaacggttttaatcgtggcagcaccattcttggtcgtcggttatttgatcagttttttggggaattttgtgcaaattggttttttatttacggctaaaccattaaagcctgatttcaaacgtttgaaccctttaagtggtttcaaaaggatgtttagtctggatgcgatagtcaacctgggaaaaacgctggcaaagttcttactgatcgcatatctgtgttatcgcaaatacatatctacgttacgtgacattttaaatgctggttctgttggtcctgccaagatcttgttttttattctcaatttttgtaaagaactagggatgcagattgccttggttttgttggttttggggttggcagattttgcctatcaaagtttcagtcggactaagaaattgaagatgactaaacaagagatcaaagaagaaatgaaacaaatggaaggcgatccgaaggtcaaagcgcagcggaaagctaagtatcaggcgatggtccggaactcgatcgcccaagttaaagatgcgacagtcgttttggcgaacccgactcatttagcgttggcaatcaagtatgataagacagaaacaccagtcccacagctgcttgctaaaggagctgatgaggtcgccatgaaaatgaaagaagaagccagaaaaaatgatgtaccgatcattgagaataaaccgctggcacgagcaatttatctcaagatcgaggcaggagaattcattccggaagagttttttgagccagtcgctgatttgatcgctttggtctaccggttggatgaagaagctaagtataaaatataagtctggttaaagttgaaccggatttgagttgataggagagagagtaactgatgaaaaacaagcaaaaagcagctaagaagaatgcactcagaccagctgacctgatcgtttcacttttggtggtcagtatcattggtttgatcatcattccgcttccgctgccagtcttggattttttgatcaccatcaacatggcgatcgccatgaacatattattgatcaccatgtttactcactcagtcttggaatttactacttttccaaccttacttttgatcacaacgatgttcaagttaggtttaaacatgtcatcgactcgtgcgatcctaacacaaggtgatgggggacatgttattgccgcctttgctgacgttatggcagggaaaaactatattgttgggatcatcttgttcgtgatcatcatgatcgtgcagttggtcgttgtgactaacggttccggccgtgtttcagaagtgtcggcccgtttcaccttggatgctatgccagggaaacagatggcgatcgattcggatctgaactcgggtttgatcgatgaaaagcaggctagaaaacgacgggaagacctgcaacgtgaagcagatttttatggttcgatggatggtgccagcaagttcgttaaaggtgatgccattgcggggatcgtcattgttttagtcaatctgattggtggaacaatcatctttactatgaaaggtgatctcagcgcaatggaagctttatcacagtttggcaagctgtcgatcggtgatggcttggtcagttcgatcccttcactattgatctcaattgcctcaggtattattgttactcgctctgataatgatagtacgtttggtaaagatattgctgaagatgcgttgcgcaatccgcaaatattccggatcgtagcggggatcttaatggttttatcccttgtccccggttttccgtttattccctttatggttatggggttagccctacttggtgttagcttcctgatcaaacaacaggatgctaagaaagttaaggaagagcaacaacgaaaacagactttggctttacaaaagaaaaaagatgtccaagaagacgaagatgtagccgatttccaagtcgaaactttagcgatcgaaattggttatgcactgataccgctggtcgatagttcgatcgacaatagtttgatgagccggatcattgctttacgtaaacaaactgctcatgaattagggatcttggtcagtccagtgaggatccgagataacttgtacctggatgcaaataattattctatcaagatcaagggcaatgaggtcggcacgggtgatatttatcctgataaatacatgatctttagtccgactggggatgagatcccgtttaatggcatccaagccgtggaaccagcctttcatttagaagcgatgtggatcaatgaaagtgataaagaagcggctgacctgcaaggattcacagttatcgaacctttgactgttatcgccactcatttgaaggaagttatttactcacatgctcctgaacttttgggacgccaagaagttaagcaattattggaaggcattaagcaacaaagcaacgttgtgatcgatgaattgatcccagatattttacgcttaggagaagttgaaaaggtcctccagaatttgttggaagaaaaggtaccgatcaatgatttatcaactatcttagaaactctggcagattatgggaccgtcaccaaagataccgaaacgctgacagaatacgttcgccaagcattaagaagaacaattgccaacaagtatgtcggtgaagataacaaaatttatgccgttactgtgcatcccaaaattgaagaaatggttgcacagagtattaaaaaaacagcaactggttcgtatcctgttttgcagccggatacggtcaataagatgttggatgcgatcactcagctgaatcaaaaaatgctggtggaaaatatttcctttgtccttttgacaaatccacagactagaactgcgtttagaaagttgttgtcgtttaacttcccagatttggcaattttgtcgttaaatgagatcccaaatgaaatcgggatcgaggcagtcgggcagttgcaattttaggaaggcactctgtgggaaggcgtgttgaagatagctggccagagtatgcatcacattctgacttgtgagaaaaacatagccagagtatgcatcacattctgacttgtggcacaaactatgccagagaaagcgtcacatttcgatttgcgacacaaactacgccaaagtatgcgttgcattatgatttgtgacacaaactatgccagagtatgcgttgcattatgatttatgacacaaactatgccagagtatgcgttgcattctgatttgtgacacaaactatgccagagtacgcgttacattctgatttgtgagacaaactatgccaaagtaagcgtcacattccaatttgcaacacatatttgcaagaacaaggatagaagacaattacttcacccggtattttcagaaaggagcttttttcttgtatgagatgaatatggaagatcaagttatcaaatatttgcctttagttgaaaaggtcatcgctcggatcactgttaaaagctccgattatgactacgaagatctcttcaatactggagtgatcggcttgatcgatgcacttaagaaatttgatccacaaaagaaagtaccatttgaaagttatgcttatgtacggatccgtgggaccatcattgatgagatccgcagtcacggtcggttgtctcgttataaatttgacaatttgactcgctattatcgggctaagcaggaattagagcaagaattgaaacgagaagctactgacaaagaattatgcagtaagctccaaatcaatcagaaaaagctgaacgatatttatgatagcttgcattatatggctagtatctctttggaggatgtcttgttttcagcagaacaatcgcctagcagacaagagatctttcgtgataaaaaaacgggcgatgcacaagcacatttgttggaaacagaaatgaaacaggagttggcagcggcgatcagcaagctttctgaaagagaacaattagttttgagtttgtattacgaacaggaaatgacacttaaagaaattagtttggtcttagacgtttctattgcacgcgtttcacagatccatgggcgtgcagttggaaaactaaaaggatttatggaggaaaatgatgattagaggaattgatactttaagacatagttttaatgttttgcaagctcaacaagaaaatattagcggtaacatcgctaatatcaagacacctggctacctgcaaaaaaatttgtttgaagcaacaatgaacgaggcacagttacataataaccaggctggtcccaaaaatgaaacccgccatgagattggcggttttacatggggcaatcaaattcagggcagtgctctggacatgcaaaaaggctcgcttgaaccgacaggcttggcaacggattttgcagttcaaggcaatggcttttttgccgttagaatgggaaatggtcaaatcgcgtatacgcgtgatggtcatttttcagtgaatgatgccggtcagctgatcactgaagaaggttttcaagtgataggtcgaaatggcggcccagttgatgcccagcaagcacaacaaaatttgatggtggtgtctttcccagcaaatgcacaacttcaaaatgtcggcggaacgctttataccgggcagggagcccagcaaattgatttgccggtccaagctggaatgcttgaaaattctaatgtttctactgctgatgagatggtctcattaatggaaaccgggcgccaatttcaggctcaacaaaaagtgctatcagctactaattcgaccttggataaggcagtcaaccaactaggtcggatctagatcaaatagttggttatttttctcaggcgtacagtgagtcttgatggtacttagtataggcttgagaaaacagatcatgtaggaaatgaggagagtaagtaaaaatgaacttgaattctattttatccattaacagaacaggtttgaacggcttgcaaaataatctggataatgtttcacataacattgctaacgaaaacacagtaggctataagggaatcatcaattcatttaatgagctgatgaataataatttaactaatagcgacggtgcacttggtaattctaatgcaagagttgattcgaatactggtctaaatgccgcgggagcacgagtcgatgatcaagtcggaaaatttgaaacgaccggtcgtgcacttgatatggctattaacggcaatgctttttttgggatcattggtcccgatggtaatacatacttgactaaggcaggagactttcatcgtgatgctaacggtggtttgatcgccagcaacggctatcgggttgcagttgacgcgcgggtgccagaacaaaattggccagcaggggacttgaaagtttcttcagacggaacgatcagatccggtgatcaggttttagggtctttacgtttatttgaaccaaacaacgcacattcattggtgtcagttggtgataacttgtatttagccaatggcggttttagagccgctggggcaggtagtagtgtgatgcaaggaactcttgaaagttccaatgtagatctggctactcaaatgacagaattattaacagcacagaggtcttaccaaatgaatgcccgcgctgcttcatctacagatgaaatgatggagaccatcaaccactttaccgactgatttaggagaaaaaattgatcgaacttaaaaatgtaacaaaaaaatatggcaatgtttgggcaaataaaaatatttcatgcgtgatcgaacaaggtgaatttgtttatgtagttggtccaagtggggctgggaaaacaactttacttgagatcttaagtgctcaacgctccattgattctggtatagcccggatcggcaatattgaaattgaatatttgagaaatgaacagatatacaaactacgccgtcaattggggatcgtttcgcaaaaagacctttttttaccgcgattgacgatcaaagaaaatatggaaacctgtatgtcagcgctagagatccccactgaaaagtgggaagagcggatggcagaggtattgaccagtgtcgaaatgatgctatttattgagcggttgcctcaggaactttcagtcgggcaacaaaagaaaattgcgatcgctcgtgcgttattgaatgatccgccagttattatcgcggacgaacctactgctaatttagacgttaagtcggccaaagagatcatgcaaattttctttcgcctgaatcagatggggacaacgatcattttagcaacacatgacagtaccatggttaattctttgcgtcatcgaactttggaactaaaaaatggagaactgatccgagatgatccagacggtggatattcaagattttctgatccaaaagatgtctatgtttggtaaacggttaaaaaaataaaattttaaccgatataatagattggagtgtcgttttgcttaagtgagtattatgacagataccaaatcttttatatggggaaggaaaacaaatggaaaaacgtaagaagacggctaaaaaagctaactccgaagtagctttcttgccagttttagggacagtcattgttttaattgtttttcgggcttttgttttaagttcggcacagacagcggagatgagaaggttttggatactcgcggtcattgtagtcgctttgcatctcttgtatgtactatttggtcataaaaatacggcagtaacaggaggagaagccggcggattaaaaaaactttctgttcaggtcggtaagatggtagagggagatttcagtcagatcgacgagatcggcaaagttcccggccaaagcccaatgtttattaaaactcgtgaccagttgcttggtttagccaatgcattttcagctttattaactgggatcaaggaagaaactgagcagtcggaaacaatggtcaacgatctaagtggaaaatcgacgcacgctaaaagttcgatcgatggtgtccgtcaagcgatggggactattgctactaatgctggacagcaagcaacagcttctcaaagtacagttgctcaaatgaatgtttttggtgaccaaattgaagagatacgccagaaaattgaaaaaatgaatagctatgctgacgaatcaaagcaaagtaatattcaaaacatggaaatgatgcgccaagtttcacggtcttggaaccaagaaacagaaagtcaaaagaagattgtttctgaaatgacggcgatgaatcaagatattcaaagtattggcaatatcgtgcagttgatcaatgatatttcagaacagactaatttgttggctttgaatgcttcaatagaggcggctcgtgcaggcgaggcaggtaaaggctttgcaatcgttgctgaggaagtccgtgatctggcagaacaatccggcaaatcaaccactaatattagagaactgatcgaatcgatccgtgctaagtctaagaaaatgactgttgatctggatgcatcatacaagggcagtcagcaacagcagatgaatatttctggtgtactgaaggctagcgaacaaatcaccgaggatgtcacgcagttgagcgatggcctaaccgatgttagttcacatgcagatgagatcaaagataaaaaagatgcagtcaataattctattcagcaaatggattcacagatcgctgaaacttctgcaagtacacaggaagtatcggctaacttggatgatttttattccttgatcgaagaactcgaaaaaagtgtcgaacagcttcaacaagctgatgagatcagacgtttgcaaatcggcagtttcaaattaaaaaactagcagcgtcaattcttagttgtagaagttaaagaggggtacaaaaatgggacaatatgttgtttttaaaagtcataagcaagtttttgctttgccagttgaaatgggtaaacgagtgatcgaaactgaaaagtttatctcgttgccggaagtgccagactatgtattaggtgtgtatgaatatcaagaacagatgttgccaatcgttgatcttagtaagcggctttacggcgaattatcgcctgcaacgctggactctaaggtgatcttggcacattggagcgaacggacgatggggatctttgtcgaggagatcgtagggatcatgtcgctgactgagacggattatgaaaaagatttggacagatcatcactgaagcgcccgtatatcagtcaatttttgaagatgggcgatgaagtagtgatcgagttgaacttagattatcttttcaactcttcacaagaagaggagatcatttcatccgtagattccattactgaaaattcagaaaaagaagagaatacggatgatgctgcagaacactaacgaaaccagggtaggaatctctgattataaaatttcatacgcgcctaataaaataatgaccgtggggctaggttcttgtattggaacgatcgtttatgatccagtttcaaaaatcggtggattgagtcatattatgctccctgatagtaaaccgtttgaaaagaacgggacttcaggtttgaacttggctaagtatgccaatacggcgttacccctgatggtcaaagaacttaagcaaaaagcaccacgagctaaatttcaagctaagatctctggtggtgcaaatatgtttggatttaaaaacaacctcacgacagctaatattggtcagagaaatgttgacgctgttttaaatcagttggcaagcctgcagatcccgttagttggccaagatacgggcggcagcagcggaaggaccatggtcgtcgatttaaacgatttttcgaccttgatcagggtcgtgagacaggaaaatagatacatttaaaaactatgtactgttttttaattaacgaaaatttgctcattgatgacttgagaatgttgtttaagagagaaaagtaaagatgtgaaaggattcttataccttatgaataggattttgatggttgatgactctgcatttatgcgcaaagtgatctcggatatattgaataaaatgcccagtgtttcaacggttcgaattgcacgaaacggtaaaaattgtttggacatccttgatgcagataatgattttgacttaattttaatggatattgaaatgcctgttatggatggcttgagcgcccttagacagatcaaaaaggattattctatcccggtcataatgctaagtgcagtcagtgatcaggcagtaaccatcaaagctctagaatatggtgcggccgattttatcgaaaaacctgtgaacctgatggaaattcaagacgagtgggtcagagaactgtatgcaaagatcaaaaatatttgcggacgttctagtaaaccgccagttgctgccaatcataaagccaaacccaacggagcacataaaaagcgtaacatcaggccccaagccgttgtgatcggctcatcaacgggtggaccaaaagcactattagaaattattaaaggtgtgagtcatacaaacattcctgtttttatcgtacaacatatgccagcgggatttacccgcacgttttctgagcgtttaaatgaagaaagcggcgctacagtcgttgaggctagtgataatatgctggtcaaaaatcagatctacttgtgtcctggtaattatcacatgacgatccaaggtgaccggctcaagttagatcaacgtccgaagatgcatgggacaaggccagccgttgattacttgtttgaaacggcggctgctcattatggtgctaatttaacagcttttatcctgactggaatggggcatgatggaacggcaggattgcaaacaatcatggatgaaggcggttatgtaatagctgaagatcaggaatcttgtaccgtttttggaatgccaagatctgcaattgaagctcaagttgtcgatgaagttgtaagtttgcatgagatcgggaaaatactacagacgatcgttgggtgaaattaaaatgttggaagaaaattttactgattttaataggtgggtggagcagaaatatcatatccatctcgatgattataaagaaagacaaatgcaacgcaggatcaaaaatattatggataaaaacggggtcaactcgttgcatgaatatgaacaccttttggacaaagatccaatcaaacgagcggagtttatcgagcatttgacaattaatgtgactgaattttaccgcaatcaagaaatatttagtaattttgaaaaatgtttgttagaaaaagttgctccacaatttaataatttgaaactatggagtgcggcttgttcgaccggcgccgaaccatacaccttagcgatgatcttagaaaaaaatcatcttatgggcaatgttctagcaacggatattgatgatgacattttaaagaaagcacgtttaggtcagtattcgacaaatgagttaaaaaatatttctgatactgatgttagacgatattttaagtcattaggaccagaccagtatcaaatagggccagccgtcaaacaacgagtttcgttcaagaaacatgatttattggctgaccagtatgaatcaggttttcatgcgataatttgtcgcaatgtaacgatttatttcaaacccatggcacgcgatcgagtttatcaaaaaataagtgaggcgctggtaccaggtggaatattgttcacgggagcaacagaaacacttaacagcgcagaaaagctggggttaaagaaaatagagtcgtttatatatgagaaacaaggtgagtgagacgggagaaagtgagcactatcggacactagattcagattgcgtattttgcgatgtggaactaatgttggataggcggagctttctgtctcaagcaacctgactaagaaaacaaggtggagtgagccggttaaaagtcgagcattagcggactttaacaataagcacagaccattcgtgcttaggtgtaaataatttgaatggggggatcattgatggctgacgataatagtgtttatcgcgatatctttttcgaagaaagcgaagataatttaacacaactaaatgataatattctagaacttgaaaaagaaccagacaatatcgatttgatcaatgaaatttttagagctgcacataccctaaaaggaatgtcagcaactatgggatatactgtcatgagcaagttgactcataaaatggaagatatttttgatcttttcaaatcaggcaagttgaaggtaacaagtgatcatatttctctgatttttcggtgcttagataaattgaccgaacttctagacggcttgcgagatgaagaagaacaaagcgaagatcagatcacagaattatggaatgaattagataaagttgaaaatgaattagatggcggccaaacaaaaaccgctgataaaaatgtagatgagaagaaagctccagaagatagtcagctcgaactgaaatttgaaactttagaagaagctgacttatcagtgatcgaacaggctaaaacacaacatcttaatgtgatcagtgcggcagttcgaatcgatccagagtcaatgctgaaaggcccacgagcattcttagtcatcgataagctcgacagtgaaggagatattattcacattgaaccggctcctgaccagctggaagaaggcaattttgatacagatttcaaattgttgatcctaactgaaagtaatcaagatgacattaagaagatcattgaatctagtagtgagatcgctgaagttttgacggcagaattcgatgagaaaactcaaaaggcagccgctgaagaaccacaaaaagacgcacaaccagctgttgacaaagaaaatactactgagaaaaaaagcgctgctcctgaacctaagaaagcaaaagccccgtctaagaagagcacttcgcatcaaaaaaatgccaaaaatcagtcgatcagagttgatctttctcggttggatacctttttgaatgttgtatctgagttggtcgtttatcgcaatcaactagaagatgccaatagtcgccaaaatttagaagaagtgcatgaatctttagaacaggtttcacgcttgacatctgaactgcaggatttggttttgaaaattcggatgcagcaagtcagcgttgtctttagtcgttttccacggatggttcgcgatctttccaaccagttaaataaaaagatgactcttgaaattgagggcgaagaaactgaattagataaaactgtggttaccgaactcagtgagcccttgatccatttagttagaaattcagccgaccatgggatcgaggatgctgaaaacagaaagaaacttggcaaaccggaagaaggaaagataaaattatcggcttatcaagaaggaaataaggtcatgatcactttgagcgatgatggtaaaggccttgatccacaagtccttaaaattaccgctgaagagcgtggaatcgatacgaccggtatgagtgataaagagctgcaaatgttagtctttaatcctggcttttcaacggctaaaaagatcactaacatttcaggacgtggggtcggcttggatgctgttcaagctaaaatcaacgaactgggcggttcattggaagttgacagtaaagtcaatgtgggtacgaaaacagttatcaaattaccgttgaccttgtctattattcaggcactgatggtcaaactaggcgaagaaacatttgctatcccgttagatgttgttgaacgggtcgaaatgatccatgaagataatattttacaaactgctagtcaggaagtctatcctttacagacaggattgacaccagtgatccggactgccaacattttgaatatccctgaaaaggatcagggaaagaaatatatgatcttgatcaagggtgataataaagactttgggatcgtagttgatgaattgatcggacagcaagaaatcgtaatcaagaagattgatccgatgttgcaaaaaatcaaaagattccaaggcgcgacgatccttggcaacggctcgatcgcattgatcttggacgtcaatacgatctgtaaagacgcacaggtgggttaagatggcatattcaaacatacaattagatgcgttaaaagaagttatgaatattggcggcggcaaagcagctacaacaatatcacaaatggttggcagtgtgatcaggatgcgtgttccagaagtcaatatcttaagttatgacgagctttaccagcaagttatggccgatgaccaggaagtttataccgttttaagcagcatccatggtgacttaaagggtgcgatgctatttgttattacggacccggccgctaaagagatctcaagtttgatgatgggaacagatcaaggtgtgaccgaagaaattaaggtttctgcagttagtgaattgactaacattgtttcaagttcatttttaacatcgatcggcgggatgctggaaaagaaattaaaaccagaagttccggtaagttcgtttgatatgtttggtgccgtgattagtagtgcatatatggaatttgaacagtttggtgatgagatcatggtgatcagaaatgaatttacttatgattctaattacttggaagcttcactatacttcatcccagagttgggtgtaattgacaaaatgataaaatcacttggagtttgagaggagaatgtcgcgtggcaaataaagttttgatcgtcgatgacgctgtttttatgagaatgaaattaaaggatattttagaaaagaacggctatgaggtcgctggagaagcgcaaaatgggcaagaagccttcgacctttatcagtctgagaaaccggacttggtaacaatggatattaccatgccggatgtggatgggatccaggccgtgaaaatgatcaaggaatttgatagcagtgcaaaagttgtaatgtgcagtgcgatgggccaacaaggaatggtcatggatgctatcagagctggagcagtcgattttatcgtcaaaccttttgatactgatcgggtgatcaaagccttagataaggcattgtcttaattaaagttctattgactgaatttaattaagaaagggagtgtgttttaatgcagatgattttgtttaaaatgaatcagcaacattatttgatagctgccgaaactgtagaagaagttgttgatacggttcaaattaccaaagtcccgcttgctccgctttgggtcaagggtttgataaatttgcgaggcacagtgttgacggtgatcagcttggcacagttagtaggattggcggaatcacaaacaaaccgaaatattatgataatgaaaaaagacgatgaacgtcgtggattattgatcgatgaagtgatcgaagtgatggatgttgatcctgatgatattcaactaagtgaagatcaagccgccctttattttaccggtgtggtagacttgggtgaacaaacgattgctgatgtgatcgacgttaatgataagattttttaattgtggaatgaactaatgagcgagaggaagtgtctttgtggatcaggtgttatcacagcaggaaatcgattcacttttaaatgcctatgattcgggcgaattagacgaagaagtgatcgatgaagagcaaaatgacgaatcacaagcgaagccatacgattttagaaggccgacacggctatctaaagaatatataaataccttacacatgatttttgaagacttcgctaagatgagcggcaatgttctttcaaatatcttgcggactaacttggatatgcaattagcatcgatcgagcagatcagttatgacgaattcattcattcaatcccacgtgtgactttgatcggaatgtttaaagcagctccccttaaaggatcacacatgatcgaaatcaatccccaactatgtatgactttagtcgaattgttgtgtggtggtgctgatttggagagtaaccgaaaaaatcaaccgcctttggataaaaatggttttacagatatcgaattaactttattggatgaggttatgggtgaattctctaaaattttgcaatcagtttggaaagaagtcctgacacttgatgttgagcttgaatctctagaaacaaatccacaattactacagtccttatcacctaatgaaccagttgtattagctactttcacagtacagcttttcggagtttcaacatttattaacttgtgtattccttatgtttcattcgaaggtatcctagataaattgagtttgcataattggtttgactcaagccaggaattaagtgaagatgaccaaagcgaattaaaacacgggttaaacgcaatagatctgccaatggaagtcgttttgggcaacacccaaatggacttggctgatttcttgaaattagaaccaggcgatgtcatcaagctggactctaaaatctccagtccgttagatacgtacattgaagaccgaccgttttactgggtcaaaccagggaaaaagaatggacaattcgcaattgagttattgagcaagatcgagggggaagaagaatgacggagagtttaacacaagaacaaatagatgctttgatgaatggcagtgatactcaagaagctgcgcaatcagatgatgaagaattattggaggggttagatcgccaaggggtcaaagacctgatcggtgaagttggtaatatttccatgtcacaggcagcaacaactctgtcatcaattctgactcatcgtgtggcaattacgacaccacgtgttaaaaaaatccattttggtgaattactcgaccagatccatgcacccaaagttgctacgaccgttgaatttcgtgaaggtttagcaggaactaacttaatgttgctagaggtcagtgatgcaacggttattgctgatctgatgatgggtggcgatggaaagtcagcttcagaagaatttactgaagtcgaattaagtgccgtgggtgaagcgatgaatcaaatgattggttcagcttcgacatccatggctactatgatcaaccaaaaagtcgatattcttcctccaaaagtgcatttgtgggaaaatcccggcgatgtgaatgaagactctttggaccgtgaggaagaaatttattgtatttcatttaacttggatgtagaaggactgatcgagagtgaaattatgcagatcttttctttggaaatggtcaaagatattgtgaaagcaatgatgtctgacaaagcaacagttgtcaaacgtgatgcggagaaaccagcagtcgagaaagccaaggctattagtaaaccacaaccagctccgcaacaagttaagatcccgcaaaaaccaagcaatgaacaaccacaaagaaaggcgcaggtcagtaacgtggaaatttctaaacccgaatttgaagaattgtcgagtcaccaagaaatcagcggtgataacttagatttgatcttagatattccattaaacctaagcgttgtcttggggcggactaaaaagactgttcgagatattttgaactttaacactggttcagttatcgaacttgataaattaacagacgaacctttggagatcatgttgaacggaaaattgatcgcaactggggaagttgttgtgatcaatgaaaactttggcgtgcggatcaataagatcatttctcaaaaacaaaggatcaataaaataaattaagttaaaaaaagttgaacttttaggtttaactttttttattttggccgataactgtatttgtagagtcaaaaaggaaaaaggaggcattcacatgaaaattaatcgagatatttcttcaatcaattcacaaatgatccaaaactactatcacaatcaagcctcgaaaacaacgaaaaagggtgcaccacaacagtttaatgttaaattatcagatactgctcaaagattagtaaacaacgctaaaaatcgtgatatagacgatgatgtggatgcggctaaggtcgacaaaatcaaacagcagttggcaaacggaacatataaggtctcaccagaaaagattgctgatcagatgttccaggaaatgaaacaagaaggaaataaagatgaatgaaaaggcatttcaggctaagcttaaattatttatcaaaatactgaaacgtgaacaaaagtttttagttcttgatgacggagaatcgctaaatgaaattgttccgcaaaaggaagatttcttaccgatttttgagaagtatactggtgaaattggcgacaaaacaaagatgctgattcaagaaatccaagagttgcaagaaactaatttattgttgacgcaacaagccttggcttatcagaaaaaaatgatggatacgatccaacacagcttggaaaaacaggaaaatacttatgttgatcagcataggactcaaagtcaacctaagcgagaagatattcctgcggcaatcgtagatcagtcattttaggttgtagaaggggtgcgtgaaccaaaagtctgtgcctatccaacttcgccaacaagtcgtaaaccacgacttattgtcaaagtccgatagtgctcaacttttatgcggttcacttcaccttgttattagtcaggttacgaaatgcaaaagcttgtgcttaactaacttcaacaaaaagtcgctaaatgcacgacttattgttaaagtccgttaatgctcggcttctaaccgcatttcttcaccttgttattcttagtcaggttgcgtgaaccaaaagtctgtgcctatccaacttcgccaacaagtcgcaaaccacgacttattgtcaaagtccgatagtgctcaacttttatgcggttcacttcaccttgttattctttaggaggactttcatgtcaggtttatttggtactttgaatactgctcgcagtgggttagatgctaaccaaatcggcttgcagactagcagtcataatattgctaatactaataccgaaggttactcgcgccaacgtgttgatttatcaacgaagatcccttatgcaaaaacaggagtcggtttgatcggtagcggtgttcaagctgatggtatctcacggatcgttgatgactttgtacgttcacaggttcgagattctaattcagattacaattttaacgtccaaaagtcagatgttttggctttattagaaaatgcattacatgagccgtcagacgatggactcattacacaattgaataattttgctgacagcttacaaaagttagccgacaatcccgagttggatacggctaaaactaatagtgttcaaatgggtgttgctttagcttcttatatccagcaaactgcacggcaagtttcacaagtttctactgatacacgttcttctttggcgaaaactgttctagattttaatgaaaaggcggaacaactcgctaatttgaatcaacagttgtatgacagtcatttaagtgatgaacagcccaatgatttgttagatcagcgcgatagtttattaaaggatatgtctgctgaaagtaatttaacagtttcgtttgacaaatatggccgtgcttcacttagtatcggtgaccatgcagtggttgacaatgaaaaaggagtacagactaagttaaatgttgttgtcagtaactctgacggcaaagctcagattttgccaaatggtgatgaaacacaaccaaagcaaacgatcgatggagacttcacggtcggagaagtcgtttttgaaacagcgaacggttcaggtaagtatagcaagttagcagttaagtcaggttcgatcggcggtttgcaagaatcattggctgaagtggaaagccatcgagctgaattaaatgattttgctaaaggcgttgtagaaattgaaaatatcgtttattctgacgggcaaactccagatagcggcttttttgaaatcaccgatcccagtgatccggctttaagtattaagatcaacgatgatttagtcgcagatccaggcaaaatgaaagtcggtactggtgatgatccggccgaaggagataatggacgtgctttagcgatggctaaggcgcttaagagtaagcttgattatccggttgatacggcgaaattgttggaaaattataataagggtactttgaccttcaataattctcaagatggtttaacgattccaggtgcctataacagtatcgtgacaaaaaatgggatatctaaacaaaaagcagacaatatggcatctgctcaattatcagcgttgaatcaattggaatacaaagatcaagcagcttctggtgttaatttgaacgaagaaatgtcagatgtgatcagatttcaacaaggttttcaagctaatgccaaattgttaaatgtcgtttcagaaatgttggatactttgatcaatagaacgggggtttaatcaatgagggtttccagtaaaatggaatattctgatttcttgaagaatttacagatcagtactaacaaggttcaaaagacaatgaatcaactgtctagtttgaaagaggtcaataaggcttctgataatcctttgttagtcgcaaagatcttagatctgaatgtttcaatttcacaaaacaaaacgtatggccaaacaatttctgattccacgctctggtcgcaaacgcaagactcagctttagataatgtttcgaccttgatgcttaacattagaaatttgatcgagtcgtcggccaatagcggaacagctacacctgccgtttacaatgcgaaccgtaaagaaatctcacagtcgatctcagggatagttgatgccttgaataccaactatgatggcaggtatatctttggggggacaaagacacaagagccaccatttgctgttattaaagatgctgaaggggcagctgtcagtttagaatacagaggcaacgtggataatttacagcgcgagatctcagatggtgtcagcttagatttagctactgatggttcacgtttgatgcatgccgatggttcgtctggcattgataaagatagcaagtctgaactgaccgaattctttagcggtttgattgatactttgaaatcgggggatcctgatagaaagttatccagtgaatatttgtcagggatcgataaatttactgaaaactttactgactataggtctaaggtcggttcgatcgaaaatcgtttaagttcagcatcagctcggaacaaatccgagaaaaatactttagcagaaactttgtctaataaacaagatgttgatgttgcagagaagtatatggaatatcaaaatcaaatgattgcatatcgttcgaccttggctatggggactaaggtcatgcaaacttcgatattagattatctgcgttaaagttatgttttgttttagtggggctaaaggggtaaaagagcagtaattgctcgttaatttgatgacttcagcgcaagcaaaagcaaatactggcaaacatattatttaggggttgtttgcttcagtgcttttgtgaacgatagtcatgagatccttaggggatcaaattagatagttagggaaagatggggaaagaaaatggcaagtaagaaaaaagttgctaaaaagagtattcagaagtattttttatcgtcactcttattgatagcattggtaccggcaattataatgaatttgatctcatacgggaatacacgtcagcaattgatcgagaaaaatgaccgtttaaaagtgacggctgtaaatgttttgcaacggcaacaagttgacatgcggcaagatgttactggacaaattgctagtttggaaaaaagaccagagttgaccaataatgtcaacttaaaagatgctaacagaactttgaaaattgccaatggcgacgcccagggaacgatcaccaacttgatgtatgtcaacactgatggtacatatgcttattcgaattttgcgatgcctaaagatatgaatattttagatcaagattggtatcaaaaagcacccacaggacatgcatattggtcgattccttataaagatccggctaatcattcgtatagtgcaagtgtttcccagaaaatcgtagataagcaggggaaagcccatgttttagcagttactgtttcatattcatcagtacaaaaatctgttgaatcgatggaaatcggaaacaatggtcaagccgccgttttaactaaagccggcagggttttgatcaaaaagaacactggtaaaagcaataatacttttaaagcaggtaaaatgatcaacaagacagccgtttataaagcagtggctgcttcagcgaaaaagaaggggacgatcaaagttcctggaggttcgcagatcaataaggttacctttgacaagggcaatggcacaactgacaattggaccatcgcccaaatgaacaatagtgatttgagcgcaggcacacatcatatgttgataaccttgacaatctcaatgttggcgatcatcattttagccgtgataatatcttactatagtgcaggtttgctcaaacgtgctttattaatacttgagaagttctttatagatgctggccaaggtaagatgagttacgtgcctgcagtgggtgaaaaaatcgagtattctaaggtaccaatagaacgtctagctcaaaagatgaccagagctgatgtgaatggacatgagtttaacagattagcggctagttacaataatatgatcgcttctgtcactgttctgatcggacaaacacagcaagaagccaagaatgtttctgaaaaagctgcatcattacttgacctttcgaaacaaacagcaactgcttctgaagaaatcgcacagacgatcactgaaattgctgaagtgacaggatcacaagcaaaagaaactactgaaagcgtggataacgttcaaaaaatcactgcacatattgataatgtcaatgcgaatatggaagagcttgctaattcatccaaagaagcttcaaaagttggacaaaataacctggatgtcatggacaaggtcaatggtaactggtcaaatgagatcaacggaatgcaagctttgatgagtagtgttcaggaaatggatagtgatgtacaaaacattactaagatcattaacgttatcaatgatattgcaagacagacgaacttgcttgctttgaatgcatcgatcgaagcggctagtgcaggcgaagcaggaaaaggattctcagttgttgcagcggagatccggaagttagctgaacaaagtaatgattcgactaaagaaattgagtcgatcattgaacagatcagacagcaatcaactggtttggtcaagacaacaacagactcactggaaagcagtgaaaaacagactggtttgatcacagaagccatcaagtcgacaatgaacgtttataagcataatgaagctatgggtgcaaatgttcaaaagatccatgagggtacaaaagagatcagtgaaactcaaaagatgatcttagataaacttgaaagcatctcagcttcaacacaagaaaacgcagcaggaatagaggaagtttcggctaactctgaagaagtgcaagctacgatggatgagtttacccaacatgtttcgaccttggaagaaactgctgctcagttgcaaaaactgacgggtcaatttgatttagataactaagcagaaagctgagaagctggccaattgcgagtccgttattaaatagcaaaaagttaatataagagaactgcaaacaaaaaagatcgttcttctttaaattgaaggacgatctttttgcatgtagttaattattttgccaactaatgatcagtgcttgtggaccgatgaaggaaaatatcgaaggtgaatatagatcagttactagttgaagttgcggcataatttctttcaggcaagaaacatatttttccaagaccattgtattgtctgccacgattgctagttccggttttgctgcagagctgcgaaacttattcaatagcgccgttgcaatttttttcgtgcgtgaacttttcatcaagacttcaagttcaccattttcggaaaaatgtagcaaggttttataatgcagcatattattactgaagagatgtgcattatttgaaatagaaccgatccgacgcaagtttttgagattttccattatgaccagtgtatgttgcttttggcgatacttggttagttctgctaaaatgtcagcaatttttagtccgtgagtaatcatagtaagtgctcgttcaaccaacgctccttctgcaggaccaagagtatgagaatcaaagagatggatcttaagcggctgttgacagcttttggcgaaagtagagagatttgagcctaagccactgatcgaactggcaatatgtatacaaagtacgtcagtataaccagcttgttgaagttcatcggttactgcagaaattgtggttagagggatctgctcttctgttacagtgttaagcgtggcttcccttagcgtttctattccagcaacttctggtaattcattgggataataagcttctccatccaatgaaagtgggatctgtaagaccctaatattcggttgtgatccgactttactgctgatcatcgcagcgctgtcagttaaaatagcgattttcattagtaatatccattcattgtataaatttcgtgggtcgtgtcaaatatttgttaggctagacagttagttgatccacgatttttagcgactagttactcggttgttaaaatgtctaatagtaaaattataacatgcttttcaggttgataaacggtcgtcttttttctatacttgaaagtacagtattaatggaataattacttgttacatggtggttcgtgaccatcccacctaaaaactaggagattcttaaaaagggcacgtcttaataataaagttgctgagatcactaaaacagttttgattgctgcactttatgtagttttaacgtttgcttttacaccattgagttatagaccgattcaatttcgtttgtcagaactgctcaatactatggtggttttcaacaaacgttacatgaggggtgtttgattgctaatttatagtcatcaatggggccggaatgtcataggcagtcgcactagaattacatctggtcagtgaagttttgttttggatgacatatttgacagtcggcattggtgaatttgttgtggttttaattggcgacattgttgtgtggctgatcaatgaaaaagttgatctaagccggtaaaagtgagcgtggtttgcaaataaagaggtggcaatgatgctgacattcctgtttatattatgcgtcctttttgtgtggagcgttttgagcttctttttcaacatcggctgcggttgcttgttaggagtcatatttttactaataataatcctgaataattcatatctttaacagtttttctttctttgcctgttatcatcttgtttgtccgtgatccaaaccaacaccttttaggtgtttaattgcgtatacaaaaagagcacagcctgtgctattgttaagtcgaccaaaaccaacacagaacaggagtgctccatatgtcgactttacaacaacaaaccgttaacttcaacaaaaatctggttctttctaataatggtggtcatttatctaacgatgcgggtctaattttagtggctgaatttatgcatcagatccactttaagcgccttttgaaagaaactctccattttaaggaaaaccgcaagttctataggtaccataagaaccagctgtttaaacaactgttgattcagctgattgcgggttatttcgacgatactgccgctaataaactgaccgcagacatgagctttgagcttgttttagataatttagttgcttcgcaaccaactctttcacgttatatcaaccaaatttccgcagacgacttggccgggatcacaaaattagtcgccaagttagcgcagttagtgatcacacaaaagaagcaacgtcaactgatcattgatcttgattcgactcattccgatacatttggttaccagaaaggcagtgcttttaacacccattatcaaacgaacggttatcatcccctgttggcttttgatggtttttcgggttgtctcttaggagctaaattacggccaggtaacgaatacacttccaaaaatgcggaagcttttttgaaaccgctactgaaacaatacgctgctttagatgtactagtccgggctgactcgggttttgccaagccagaaatttatgccgcctgtgaagaagctggggcaaagtttacgatccgtctcaaggctaatccaaaactacaacggatcgccgagcacttgatccatgtggggcaacctggggaagacttcgccgaaaaagatgtccagtggcaccgtttgacagattaccaaccggacacttggggtcgcgcttaccccgtgatcattaaatcaactcgccctgctggcgagctactctttaaacacgaatttatcgtgactaacttggagctggcttttgccagtgacgtctttgaactctatcaccaacgtggagccatggaggatctgatcaaagaagttaaaagtggctttgcctttgataaaacggatagttccagttttacggctaaccagtttagaatgttactcgccggtgtggcttataacttagttcaagccatgaaaaaactggttttcccagctgaattagggaacgcaacgagcgccactttacgtttcaagctctttcatttggccggcagagtcacccaacatgcacgtaaattatggctgcatctttctagtaccaatgtttttgatgatttatactggcaaacattgtttaggattcaagaatttcagctcactagtaattaaaaaagacaatttaaaaaatttaagtacgatcaagggagtagtttactcttttgacaccaatcaaaaataaaattgtcttaaaaatagctcaaatacactcaaaaatagttgcggattaaatttgagctaaattaaacgttaaaaggggcaaattacctttacgcaacaaagtatgaattattcaggattatttgtaacgcttacattttaagcggtatacttaagtaagtgaaacataaaatcatcaggaggtctttattaatggtagcacagaaaataaacgcatcagatgcaatgttaaaagtcatggcagactggggaattgaccatatttttggtttacccggtggctcgtttgattcaacgatgaatgcactacataaccagaaagcgattatgcgttacattcaagtgcgccatgaagaagtcggtgcactagcagcggcgggtgaagccaaagcaactggcaagattgctgctacatttggctcagccggacctggtgcagtccacttgttaaatggtctctacgatgctaaatatgataatgttcctgtattagcattagttggacaagttgctacgggtgtgatgaatacggattatttccaagaaatgaatgaaaaccccatgtttgctgatgtggcagtctataatcggacggtaatgacggctgaacagatgccacttgtagtcgaccaagccattcaacaagcctataaacaccgcggcgtagcagttgtcacgattccaactaacctaggctgggaaccgattggagataacttcgaggccactgcaaacttattccaaatgggcaattatccagagccaagaagcgcggatattgatcgtacattacagttaattaaagatgcaaaacaacccattatttattttggtcaaggtgcacgtgctgcgggtgaagaattggttgctttatctgatcggttgagtatcccaatgatgtcatcagccctttcaaaagggattgttgccgatgaccatccagcttatatggtttcagctgggcgagtagccacgaaacccggagttgatttggcagaagctgctgatctaatcttatttgtcggtagcaattatgaattcggtcaatacttcttcaagccagatgccaaatttattcaaattgatatcgatcctactaaactaggacacagacaccatgtggatgtcggaattttagcggatgctaagacggcattaaaggcattgctagccgcgagtgaaccagttgccaaaaaatctgccttttataaagcagcactcgccaataaagaaaactggaatgaatggaaagccagttttgaagaagacgatcaaacaccgttacgtgtggaacccgtcttcaaacaaatcaatgagatggccactgacgatgccatctttaatctcgatgttgggaatgtttcaatcgatggggtgcgtttcttgaaaatgcatccaggccaacgtatgacgttatcagcatggtatgccacaatgggttgcgcagtgcctgcagcaatcgggacccaggctgcctaccctgaccgtcaaatctggtcgattagtggtgacggtggcttcacgatggtgatgcaagatattatcacgcaagttaaataccaaatgccaatcatcaacgttgtattaagcaacgattcattcggattcattgaagctgaacaagatgataagggtcaaccacactcaggggttgccattcaaggggcagattacggtgcagcagcaacagcgatgggcgcaaaaggatttacggtacggacattagctggattgaaagctgcttttgctgctgctaaaggcacgaaggaacctgttgtgattgatgttaaaattgctaacgaacgtccgttacccgttgaacaactcgtgattgatgatcaaacacaggatccagcagaagtagcggcctttgttgaaaaatatcatgcacaaggattgaaaccatttcggacgttcttagaaagttaagcttttttaaatcagactagcgaccgataaaaaataatgttgaatgtggtaaattataattaaaattaaccttggaaggaattcagcggatgagtagaacaatttcaagacgcttaatcagcgcaacgtctctcatggcattaatcggaagcatctcattggctatttattggtctcggcttggtctttttaataacacgaccgcgttgcaggcgtatttggggcactctgtgctaattggtccgctgattttcatcacgattcagattattcaagttgtgattcctgtcattccaggcgggattagcaccgcagccggggttttggtattcggcccactttgggggtttgtttataattacgtcgggattgcaattggttctatcttgaacttcttattagcacgacaatttgggaagccgttcatcttacacgtcatcagtgaaaaaacgtatgacaagtatatcgggacaattatggaaaagaaaaactttgtgcgcttcttcgcacttgcgattttcttaccggtcgcaccagacgatgtcttgtgcttgatggctgggctcaccgagatgtcattgaagaaatttacatggatcattattttatgcaagccagcttcaattgcagtgtatagttttgcgctggtgtatggcggtcaattcctaatgcaattaatgtaaaaaaaggcccaggatattttatcctgggccttttttgcgtgtttaggcggtttttctctttaacccgatgccagtaacggcactgagaattgagaagattggtgataagagactgaagaaacaaaatggaaggtaactcaaggtagggacgcctaaagtattagcggcaaaaacgccagcgacgccccatggaacgaggtagttgataactgtcccaccatcttcaagggcgcgccctaaagcaagattactcaagtttgatttttcaaaggtgctcttgaaggctttaccagggagaatcacagaaaggaattcttcaccgataaagaggttaacgccaatcccagaagcaataacggcgctgagcaattgacctggcgtcttaagatgggtagcaagaggggccatcacgcgttcgattaaaccaagcttcattaagaggccaccgagggttaaggtcaagataattaaggcgacggtgcttaacatgctattaatcccaccgcgtgagagcaaggcatcgatacttttatcgccggtgtgggcaacaaacccattttcaatgtaactcgcaattttagcaattggtgtgtgtgggttgtggaaaaagattaaaccgattgaaacggcaatgtttaaaaagagtgttggaattgctggcattttaaggcgagcacaaacgaaaattaagatgattggaattagtgcaagtaggctaactgaagtgtgcgtgtttaagacagcaaccgtcgcaccaattttatcgagggagacatttttcgaggtgtggccaatgatagcgtataaaattaatgagccaacaaacgctggaaccgtggtccacatcaagttcttaatatgttcaaatagatctgtttcagtaaccgctgcggttaagtttgttgattgtgaaagtggcgatgacttatcaccgaatattgccccggaaataatagctgcggccacgatggtagtgtttagtccgagtgtggctccaatcccgaagaaagcaatgccgacggttgaaatgacggtaaaggcgctcccgatggcactgccgacaagcgcacagacgacgaaaatcgagggaatgaaccagtggacactgaccattttgaagccccagaccatcaggctaggaatcacaccggcggcaatccagatactgattaaggcgccgacgagaatgaaaataatgataggaatgattccgcttttgagaccatcttcgataccagaatgaatggcgtcccagctaaagtgccgccaacgggcccatagaatcaagagggcaatcgccgttaagacgggtgtttgtggtgaaagttggaaaacaatcacgccgctacccatgatggctagcagaataagtaaaacgatacttgcttctaataaactagttttgtgttttgtcatttaaatcgcatccttttaagtttaatggttaggctggtgcgacaaaagactgataacggaggattcccccgcacgatgcaatcttgaacatgaaaatccctccatagttgaaatgtgtttttgattggcaatgttctatgcaaatgtttagatattaagcgctaaatcacgcactctacaaaaaaagtccctactcgctgatgcgaatagggacgattggaaaccgcggtaccacccagttaacgtgtcattttaaggtaacacaccactcttacaggtgataacggtcctgttaattagccgaatcatccattcagtatttcgtaacaattaccctgatcggttcgcagcaaccaccgactttctgacacccagataatgcactacttagtttgaattaagatgacttatgattgttattcaatttacggtagttcgaattaaaagtcaagcatgaactttagaaaaaatttgtatcttgtaaattgtaactgtaatctaactggtaagaatcgcttggtaatgggacagtttcagcaaaacgctgctcgaattcgtcgaggggcaagcttgtccacagacgaaaactgtgatcatcataagcggcccagtcacaaattttagttaattcgggataccgttgtaaatcaggaacaggtgtctcaataaagtgtaaaaaataatcataggattcggcttgttgagaaacggtcgaaaataaatggaaataatcgcggaatgtcatcggtatgctcgctttctacaagagtaattaatcgttattagtataaactgaaaaagtggtataccacaactttggcgcttttgtttaatggaaacataagaatttacttggcgcaacactgtaagtgggttactatgagtgttgatatgacaaaggagttgttccagatgcagattaggactgccacaactgaactacggcattttcaactaatggatcttgaagtggtctatcaaattggttgtcaaaaaaagattgtgacgcagctaaatatgacggcttttcaatctcaacaagaagcacagtcgtttctaacaatgttgatgaatgatgaggatgcttgggcgattgttgatcgcacaacgcaggtggtgcaaggattgataatgctcgcccctacccttagtgcggatggacaatcagtcgcggcatatgaactcagttttgccatcttaccggcatatcaacgatgtgggattatcagcgcagtattgccggcaacgatgcaagcctatgcgcaagaaactggtgtaaacacctttaatgcggcctgctttttaaccaaccaagcatcgcaagcgagtttacagaaagttcagttcgagaagacttatcaatcacaactaccggattatttaggcgggcaacgagttcagtactaccgccgaatagtgaacgttttcaaattgtaaaaataacatggttataaccgtaataaatcacggtttaaatgagaaagctatggtataatcggtttgaaagacaaatgggggggtaatcaaatggcaaacgaaaacgaccaagcctatgcacgaaagttagcgcaaattgaggcaaacgaaaatttgacgattctatcaagtatgaatcaggttaatgatgaaaaggttaagcagtacatcgtctatacagactatcgcgaaaatggtcaacaagaatcgacaagttcgatttttgtctacacaccatacgctaatgtcgaccgctttggacattcaacggttgattttcaagcacaactcttatttgaaaccaataaatggaaaaaagaaatgcacattacagttcttgaaacattaggagcagcttcacgcttagctgtttatgatttccaaaatcttggtttagcacaattggcagtgaaagccttctgtaatttagcgaataagttggaaattgaaacaattgatggtaatatcagtacgttcgatagagatgattttaagaaagttgcacacattcttgaaaaatatgggtttgaggtacaaaccgacgcaggtcaatcctctggttcattcactaagacgcgaaaggcgtagtgcgcgactgttaaaaaggggatagggctaatgcatttaacacgggcgtttgaacaagcaacttgtattatcgtacttttggcgacgcaagatcctgaacacacaatttcgtctgaagtcattcatcatcgcttaggcgggtcacagacttacctacgcaaaattattcgtaagttagtagtggctgggctagtgaaatcggcttctggtaatagtggtggttttacactagcgcggccagccgatgaagtttcaatctacgatgttgtgttggccacggaaggacaaattaagtcttatccagatacgggtaagttggatacggtcttcaatgacttccaacccgttgctaaacaaggaacattgattattaacgctgcgttccacaaggcggacatgctatgggcgaacgagttaaaacggcaaactgtttctggcttgattattgagacaattgggcatcaagccattccagtgattgattggaatcaatcagccgaacagcgtgaattactcatccagaagatcattaaaaatttaaaatagagtgaaagcaatccggttgttggattgctttttttgtgctgaaattgaaaattagttttcaattgattagttgatagtttcagaaaattgagaatttatttaaaaaatggacaatggcatatccaattaacgccgtaccacttgttaacaaaggattaagattaatagtgaagaaaataattaacaccaaaattaaaaatatatatttgctgaaaacttattattttattacataaaacgtactctgaattagaaggagtagcgaatagaatgagacgaatgaagcaacgatttggattgttattagcggtggttgccacttttggcctgatgttgatggttagtcatcaaccagttcaggcggagaaagtgacttattcggttacgcccgtctatcctgataatcaaacggatacggagttgggctattatgatttaaaagttactcctggtcgaaaacaagaagttggtgtgcgggttcaaaatagtggaacaaaaccaattacggtcgatgtgacccctacgacagcgacaaccaatgaaaatggattgattgattatacaggaaccaatactaagcgagattacccgtcaggaagttgcaaaatataacgataaggccgttgaattaccagagaacaataactggtggttatatgtcattatcggtattatgattgtcattatcctactattgataattcttttatggcggaaatcacgcaaagataaagaacaataagcaaaatgaaaaccacgattgaaataatcgtggttttttaatggaaataattgacgtggttgtgtgaattctgtatactcatttctaacaagataagaggtcgcaaaaaccatgagtcgttaccctgaactgactaagcagtaatgagggataattaaaggggaatttgccgaaatgtcaatttgcttattcattttgatgttgggacttggttgaataaatcaaggactgtcgtaacgaaatgttacggggcgctatcaacggatattataaggctatcagtctttttgtcgtttttagcagacaaaaagactgtttttttgtttgctagaacgtggttggggctttttcttgaaatcatagagaaaagagcgaagtattatggcaggaaatgaaatgaagcgggagttaaagacgcggcatctttcgatgattgcgttgggcggtagtatcgggacgggcttgtttgtgacaagtggttcagcaattgcaaaggcaggtccaggtggtgcattgttagcctattgtgggattgggattatggtcttcttcttgatgaccagtttgggtgaaatggcaacgtacttgcctgtctcaggttctttctcaacctatgcaacgcggtttgttgatccagcccttggttttgcgttagggtggaattattggtttaactgggcgattacgttggcggttgatattagtaccgcggcactcgttacggaattctggcttcctgatatgccagggtggatttttagcttagtcgcactattattaattttcttgattaacatcacgagtgttaaatcattcggcgaaacggaatattggtttgcgttaatcaaagtgattacggtcattattttcttaggtgttgggttactaacgattctcgggattatgggtggccatcatactggcttgagtaacttcacttataagaaggccccatttgttggtgggttaccaatgatgttgagtgtcttcgtcattgctggcttctcattccaaggcaccgaactaattgggattacagctggtgaatcaaagaccccagaaaagagtattccaaaggccattaaacaagttttctggcgcattctgctattttatattctttcaatcttcgtgattgcttgtttaattccttatgatagccactcattgttgggcgcgagtgaaacgaatattgctgttagtccatttacgttagtgttcaaacgggctgggttagcttctgcagccagcatcatgaacgcagtgatcttaacatcagtgttatcagcggcaaactcagggatgtacgcttcatcccggatgttgtggtcaatggctgaagatggctatgcagctaaaattttcgctaagacaagcaaacgtggcgtcccagtaatggcactgattggtacaacaatcataggagctttaacctttgtgacaagtatttttggaactcggatttatttattcttagtggcagctagtgggttgactgggtttattgcttggttaggaattgctgtgtcacattatcgtttccgtcgtgcgttcaaggcacaaggtcatcagttgagcgaattgaaatatcatgcacgttggttcccatttggtcccatttttgcattcgtgctttgtttattggtgattgcagggcaagatattcaagcctttaagaacttcgattggacagcgattgggattagttatatgagcattccattgtttgtcgtactatatgtttactataaagtacggtacaaaactaagatgattccactagaagaagttgatttatcaaaacataaatagcgtgcggcttacggagcacgtttagattacaaaaaggcccgacaatttaagttgtcgggcctttttgcgttattgtagcgagcgttgatcaccagctttgaaatattgttgataaggtgttaatcgttgcttgaagagctcgttgactgtcacgaaatgtcgtttttgagcggtttgttctttagcaattgcgggtaatgccttaatcgttgcctcacttgtgtgcagtaggacaagatcaccacctgtaatacgctcatttacatttttggcaattgtcggcgcatcaatatctaagcgccaatcttccgaatcaacactccaagcgattagtgcccggctagcagcggttgttaattccgtactaggggtttcggttgtgacccgtaataagtgtggcaattgaccactggctttgaagtaggcggcatcggtttgcttgaggttatcggcaatttctgacgcgctcattgtatccaagtcatcatcgttgttatacgcttgggtgccaacgacatggccagctttgagtaattgcttcagttgatccggatgttctttagctgctttaccagtagtgaaaaaagttgctttgatgtttaaatcgtttagttgattaatgacactcgtaatagtgctaggttttaatgtcgtattaaaggtgagtgcaatctttttagcaccaccttttttggaaggcatttgattgtcttctgggacaaggttgggattgaggtatggaccaaccgttgccattggcagggcaattgtttcaatatcaagaggattctttgcgaatttcaatgttagaccatctgttgtaaagtcaaaattggttgcttgatcatttcccgggaaatcaagtgcttccaattgtgtaagttgttcgggggtataatcatgggcttgtaattgttggttaattgcaagttgacgaatcatcggaattgttgtgctatctttttgtaaatctttaaacgaaaccgatgttgtattgtgctgcatatcatagatggcttcagttccagtttgtgaaaataagcgttgataacgggtcttaaaccgtgattttacaaaaccataagcctcggcggttggcttaaaagcatacgtattgtcttgcaagttcttagcagtataactgacgtacaacgtgatatggtcaatgtcgggtgattctttgtgtgcttttgcataaagctgattaccgagtgcgacttcttgtttttgtaaatcgatattggccccattttggttttgtgggacaaaataatagatttttccatgcggtttggctgcagcgtagattttaaaggccgcgtattgaccgcttgcttggtcattaaaatcacttaaaattgactgctgcatattcttttgcgactgtttaaactgctctctcataaaatattggttctcaaaatacataattggtattaagaagagtgccagaacaatcaaagtccatttttgccaagtccgcatgaatactatcctccagtaagtttgtttatctaaatttagtatactgaatttaatcgcgacttgaaagtattattcgtgaactaatctacatacccgatgctccgatttcacccaatcatgataaagccgtttttggccaggaccacgattttccaggcattcaggtgcctgagattcgctctgtcacattagctgatccgggtgccaaaaatgcacagtctgtaaaatcgaatggccatgcgcagtttaattatgcggatggcacactgcatgcggccccgcagtacggaattacaggacaagtcgacctagttaacccgcctgattcttttgggttatactatcgtgttaatgcagatcaaaatgcagtgtggcaaccggtgataaccgattcgcagttgcatttatcggagagctttatggcacagctaattaatgctagtcagaatccgactactacggagcaagggctgcattgtgatgtcatgcggacaagcgacattgagtttacgttgtctgaaaaggtggcaagtgcacctattgcaaatgatgatttaaatccaatcgctaaattccaatttaaattaactttaaacggggcagtagaggttggcatcccgaaaacaattacgtttgatgacgaaattttgggtcaaagtaggggggtactaatcggacgattgcgctaaatgaggtaccaagtgtacaactaaaagtggcagatactggtacaccaaaagcgccgaaagtagtcatatgtaatccgttgtgtagtcattttgatttacaactaggctatctggggataaatcaacgacccaataatcccttttatatgcaagaaaattttaaataccgcttaaatgatagtgatgcaaaagcattaactaatgagtcgcctgataatcaatggattgatgggattctacagcggccaatcagtgagcaagatttaacgagttatggaaccacagttggttggaaacaaagtcagttacagttatcactaccttataatgatgcttatcagattggcccatataatgctgatttgaaatggcaattggtgatttaagttattagcgtgtcaggtttaattagagctgatgacgaaattattttcagcttttgaggcggtgtgtgttaataacgcattgccttttgttatacgcaacaaatatcgctgtagaatggttatgctttaatatcgattgatggtaaaatatatatcaattatttggaacaaggggttaagcaatgtggataccaatagtgtttatttaacatcggcagaaaaagataagtatgctcttttcttagatattattaatgtcaaatgggatgaattacccattaaaaaacgaatgagcatggctaaaaaaggcgaagcactaatcgatgacgtcaatttgaagcaagtggcaacattgttagaccgtaattatagtagcttatacaatacgtatgtcagtattgttggggatctgcaggcaatattagggacggaggaagatgatgttaagcgactcttcgcaattccaagtgatgtctatcatttatatttagtacaacattctgacatctatgatttcgtacagattctattgcggggcggggatatatcgtttaaaaccttcttagcagagcatgatagtagtaaagcaactgtattacgtcatttgaagcaagtccgcgatctaacccgcgccttcaacttacgggtttcatacgaaccaatccggttggaaggggatgagaagacaatccgattggtcttatccgccttatactggttggcgtctggtgggcatcaatggctatttgaagaaatcaatcacgaatgtgttttgtcggcctttgactatgtctgcgatgaatttcaattgcaaaagcctaacctattaacgcgcgaaattggcgccacgattctggcagtaacttattatcgggtgatggccggtgcagtcgtgcagcccgatgaaaaattagcaactattcggtatccctatcctaatttaatcagtgatttacttgcagccgatttcactaaagaatcaacgggattacgaacttgtttggcagagttaacgttaacggaagggcgttcagaagccgctggactattcttcttgttacggtattgtccagtaccgttacgctcaataacaagtactaaggtgactgctgattgggcagatgaacgttatataccagaaattcatcgttttgtgactgcctttttggagcgtattccatttgatattatgcatgagttagagatttcgcagcacacatatgatattttcaaaaatgcgttgttaacgactacggtgacgacctatatccttgggatggacgcgacctctgtcgtttttaatgaattagtcattcgtatgccgcagctaaaacccaatgaactactccataaaaaaattagtgataccgtagattacctcttattcgaaccagcttttagttttttagcaagtgggcgggagaatttgataaaggcttactataatttaattcaacaagtcatccagcagtatcatcctgtaagccaggtgaaggtcgcactcgtgattgagcaagattacattggctatatggatatcttaacagcactcgataatatcaaatatgtcgctgttagtacgaccgatgaagctttacgggatgcagacctgattgttcggacgtcgagcattgccttacccgaaaacgttaatccggaggcgttgtattttacgtggcgcttaaatgctagtagcgatcactatgcccggctgtatggcattattcatgaattatggatgcaaaaaggtacccaagcataataaaaaagccgttcgacaatttgtcgaacggctttttttgtgcaattaggcacccatatttgcttcttgttctgcgtttaaggctttcacccgttcgtcaatcatttcgatgactttttgacgatcagcttcgttttcaacgaagtctaatttgtcaccatcgatttgcatcttgggactttcgtcataggcttcataccaagcatcataacggctgtttaattctttataatagtcgtagagggttggatcggcttctagttgttcgtatgaacgaccacgtttttgaatccgtgaaagcattgtttcgaaactaacgcgtacatggattaataagtcagggcgtttcttgtgggcagcaaatggcaattcttgcatcatgttggctaataattcgtcgtagacacggacttcggttgcggtagcgcgaccaagatcagcgttcaagtggaagagtaatgaatcttcgaaaattgaacggtctaagatgttgttatcatctgtatatgcttgtttgatactatcaaatcgtttgtttaagaaatagatttgtagtaagaacgcatatttagttggatctttgtagaataatggtaatacttcattatcgtctactgattcgtaaaaggcttcagtgcctaagtgatcagatagatatttagttaaactagtttttcctgcaccaattgtgccagcaagtacgagcaatgtcatcagtctccctcttttgaccataaaatgtgtttaaattattgttgatatacaacatatggtgttttacaaccaaacgtcacttaaatattctagcatttctgacgtaaaaagcaatctttgattttaaacaacgcaatagttactatttgcacaatttatggtaggattaattactaattataaggatttttactagggggaatcggtttgaacgcaagtgagagtatttttctaacgcaagcggaaaatgataagtacgccttattaatggagattgttggtttaaaacgggatgagttgcctgttaaaaagcggattgaactatcgcgtaataatcagccgctcgttgaagatgtgaatctaaaacaagtagcaatgctattaaatcgcagttacggtagcttgtacaatatgtacatgagcattattggggacctaaaggaaattatcggaccggatgttgatgatattaaaaccttgttcagcgttccaacagatgcctatcactatttattagtgaataagtcagaagcgtttgattttatcaaaatcttactcaagggtgagaccgttacattccaagaattctgggaagcccatgatacgagtaaggcaacggcgctacgccatttaaaaggggtgcgcgacttaattcgctcatttgatatccgtatgtattatgattcacttcggttagaaggcgacgaaaataaaattcatttagtcttaacgatgttattctggatggcaacggaagggcatacctggccctttgaagatgttaaacgagacgatgcacttaaggcgttcgatgttgcgattgatcggttccaattggaaaaaaccaatattttgacccgtgaactaggggcgtattcaatcgtcctaacctatttccgattactacaaggtcacacggtttcaactgaactagatggcgattttatccgttatccagttcccaatatggtttctgaatatctaaaatagccctttgaagaccaagctttacggatcaagagcattcttgcacaaatgacccaagaagaagcgatggctgaatcattcaatatatatgacatcattaattttggaccgattcagattcaggatgctaatccctacatggaatcttacgaaacgcgatacaagcggtatattccagtgatttacgaatttgtagaagcttttattgatcaaattccgtttgatatcaagaaatacctaaacttagacgatgcgaattatcaaggtttcgtgcaaacgatgatttcgatgacgatgaccacgtacatgtttaaacaagatgtgacatcggtgctcgctgaccaaatgatggaaagtgttgaatatctcaagccaaatgatgtcctaaaataaaatattgatgatacggtggattacttattaatcaatccgaaagtgtcattcttagtcaaattacgtgaagaattggtcagtggttactacaacgtcttgcgtcagatgattcaacggtttgcaccgatgaataaagtgaaggttgtcgttgtgacggaacaatccttcctcgggtactttgttttgatgactgcactgaatagtgttttgtatgcggatgttagtcaatctgacgcggatttaatggatgctgatatggtggttacgacttcgatcattgatttaactggcatcgttaacccagaagcggtgatgtttaaatggcatcaaaatgcagatagcgatcattttggacgtatgctcggtttattacggggtctatggattcaaaaatcatctattgatgattgaatttaaagattaaatgcggtattcttacattaagaagtaaacacgtgaataagcgcctatatggattgacagagagataccggttggtggaaggtattgaatccagcattccagcgcaatagtgggtagtgatgaactacacggttcctggccgttatcagtaattgagggcacctattatttgtagtgggtgaacttgggtggtaccgcgaattgaagtcttttcgtcccaattaagggatgagaaggctttttttattgttgttaattaaagatcattaaaaggagagagtgcaatgttagatattaaagtcattcgagaaaatgtccaatgggcaaaggataagttagctagccgcggtgttcaagctgcagaaattgatgaggtcatcgcattagatgaaaaacgccgtgccttaattgtgaagaccgaagaattgaagaaaaatcgcaatgctgcctcagaagccatcgccgttgccaaacgcaataaagaagatgcgactgaacaaatcgctgctatgaagaatgttggggccgaaatcaaggctttggatagcgaattggctgaagtgaaggccaaagtggactacatcttagtccgcttacccaacttcccagatgattcagcacccgttggcccagatgaaagttttagccgtgaagaacgcaaatggtcaacaccccgtgaatttgattttgaaccattagcacactgggatatcggtgaaaaattaggcatcttagactttgaacgcgccgctaaagtatcaggtagtcgctttgtttactataagggtgccggtgcacgtcttgaacgggccgtttataacttcatgttggatcaacatgctaaagaaggctatgaagaaatgatcacgccgtacttagtgaatggcgaatcaatgtttgggactggccaatttcctaagtttacggaagatgtttacacaatgaccaacgaaggcgaacccatgactttgattccaaccgccgaagtgccattgacgaacttctaccgcgacgaaatcttggatggcgcacaattgccaatctacttcactgccttatcaccagctttccgttcagaagcaggaagtgccggccgtgatacccgtggtttaatccggatgcatcaatttaacaaagttgaaatggtgaaattcacgaaaccagaagaatcattcaatgaactagaaaaaatgaccgccgatgctgaaaatatcttaaaagcattgaacttgccatatcacgtcatcacattggcaactggcgatgccagcttcacatcagctaagacatacgatatcgaagtttggttaccagctcaaaatacgtaccgtgaaatctcaagttgttcagattgtacagacttccaagcacgccgcgcccaaattcgttaccgtgacgaagatggccacgtcaacttggtgcacacattgaacggttcaggcttagcagtcggccggacagttgccgccatcttggaaaactatcaaaacgaagatggcagcgtcacaatcccagaaccattggtaccatacatgggtggcatgacgaagattgaagcaaaataattaatttaataggaagtcatttgtttcttccataagggagacggttgttatataaataacgaccgtctttttttgctagattagaaacagttgtgaatagagaatagtttggcgcataagacttgaaatttaaatgaaaaaaggttagactaatttagttatcgtggatattgaatgtaatcaattaagcaacttatataattaaaggagattttagcatgaagatgattcaaaatgaatttaagttcattgccaagaataaaatcatcatgatttcgttaatcgcaatcgtgtttattccgttcttgtacagtgtctttttcctgaaatctgtctgggatccttacggtagcactggtgaactaccagtcgctgtcgtaaataacgatcaaccagcaacttacaacggtgaaacgttgagtgctggtaaggatatggttaaggaattaaagaaaaacgaccaactaggttggcgtttcgtttcagccaagaaggctaagcaaggtttgaaggataaggaatactatacagtcgttactttacctaagaacttttcagcaaacgccgcaacagtcttggataagaatcctaaaaagatgcaaatccaatatgaaacaaacgattcattgaacttcatcggggaagttatcagtgaaatgggtgccaaggaattgaacgcccaagtacgtgaaacagtgacaaaggcttatgctcaagtcatgttcaaacaagttaaaacagctggtaaaggcttcagcacagccgcttcaggggctaagaagttaacgaagggttcagtcacactttcagatggcttgaacacttatacagctggtgttgataaggtcaacgatggtgtcatgacaatgaagaccagcgtgacacctttatcagacggtattcaaaaattagcagccggttcaggggccttaaacacaggcttacaaacattgaatagcaaaacaggcgcattagcctcaggtgctagccaattggacagcggtgccaaccaattgaacacaggtctacaaacattgaacagtaagacaggcgcattagcttcaggcgcaagccaattgaacaacggtgccggtcaattaaacacaggtttacaaacgttaaatagtaaaacaggtgcgttggcttcaggtgctaaagatttaaatgacggtgctggtcaattaaacacaggtttacaaacgttaaatgatggtaccggacaattagccggtggcgttacaaaattaaagagtggattaaatgccttagatagtaatagtgatcagttagttgctggtgctggtaaagtaaatggcggcgttgatcagttaatcgatggtagtcaacaattaagtggcgccttatctgctgctgctaatatgattgatgatcagttagatagtaaatcagaaaagttagatttattgagatcaagcatgggcgaattacagactggtgttgagaaacttaacgcggggataaatagtccacaagcagatgcaatttcaaaacaagtaacaacagacttaacggcagtagcaactgatgctacaagtacaggacaatcattacaacaaattaatagtaaactatatgataaaaatgtaagtacaagtgcagctagtcaagttgctaacactggtgcgcaattacaagctattacagaagtagtttctgatccacaaattaaagcagcattatcaaaagatccagctttagcacagaaactaaataatgcacttcaaagtgcggggactagtgttactgctacagctaatcaacttgcctcatctggtgcagatttaaatacgattaaaactaatactgaagatactggtgtacatctaaaatcagttcaaacgcagatgactaacttaatgacaagtcttcaagcattgaaaaaaggtgtaaatgaattatatgttgcagcacctcaacttaaatcgggcgtagatcaagcaattgatgaattaacaggtggtttaaaaactgttagcgcaggtttaactaaaactagtgataaaccttcagatatgggggctatccaagcaacagatactatcaatgcaggcttaagacaaattaaattaggccttgttgggactccgagtcaactaggcttaattccaggattaagcgcctatacagctggcgtatcaaaagcaagtgatgggacaaacgagttaaatagtaaggtaccagcgttgacaagcggtgttggacaattagcaacaggttcaaaagccttgtatgctggtacaacacaactaaacggtcaagtgccacaattgacaagcggtgttggacaattagcaacaggttcaaaagccttgtatgctggtacaacgcaattaaacggtcaagtaccacaattgacaagcggtgttggtcaattagctgctggttcaaaacaattagcaactggtactggtcaattgaatagccaagtaccacaattaacaagtggtgttagtcaattggcaacaggttctgaaacattgaacggtggtcttggtcaattaaacgctaagatcccaacgttaacgagtggtgttggtcaattagccgatggtacaagtcaattagctgctaactcagctaagttaaacgacggtgctggtcagttaactgatggtaacaagacattagcaactgcccttaagggtggcgcaaaacaagttaacgatatccaattaacgaataagacagcggatatgttcgctgcacctgctgaattgaaacattcaaactatagctatgtgcctaactacggtcatgctttagcaccttacgttctttcattagcattgttcgttggcgcaattgtcttcaactttgcttatccaattcggaagatctcaatgactggtcaatcatcaacagcatggttcttaagtaaaatcacggttggcgctttagtcgctgtcgggatggcaattatcgaacctgccttaatgatggttgctggattaaacgtcgatcatccagcacaattcttcctaatggcaattaccttctcacttgcttcgatgtcgatcattatgttcttatcaatgacatttgataatcctggtcgtttcttagcaatggtcctcttgatgcttcaattagggggttcaggtggtacattcccaatggaaatcacgaaccacttctacaacgtcattcacccattcttaccaatgacgtattcaattctagggctcagagaagcaattacatctggtttaggtaccggtcaaattgttcaatcattctttgttctcttagccttcatcgtcgtagcactcttgctattatggttaggaatgaatcatttacaaaaaatcggcaacggtggtcgctcacaattagacgacaaccaaaaattacaagatgtcgaaaaataatcactagaaaaagcctgtcagctaaatgctggcaggctttttttagtgcaattaagtattcttaacgtctaagaatgtataaccgcggcgatcataacggttgcgacttcttgagtattcaatcggttggccattatcgagataaacaacttgttcaacttctaagacgggatcagttggggcgcagtccagatattgctggtcatattcatcggccttgtcggcttgaatattgcgaaaggcacccgcgaacgtgaggtgtagggtctccttaaggtaggtgtagattgactgtgcgagaacatcatcagttaatccgggaactagactcactggcatgtaggtatgttcgaggacgctattaacgccgtcgataatccgcagtcgaatgattttgtagacgggctgttgatcagcaagcattaagcgatctttaatctcaggcgttgggaaagtcacctcaaacgtgatgaccttacttgagagtgttttaccaatgtcggctaagtcgcgtgacatcccacggtattgatccgctggtgccgttgatttattccaaaaagagtggtctaacacctttgtaccagcgccgcgtcgtgatagaacgagtccttccatcgttaaaatcgtgattgcttttttgatcgtcattcgactagcatcgaattcttgaactaagtcggtttgattgggtaacaacgtattagcaggatagcgcccttgtttaatccgttgtcgaataatgttggcaatttcttcgtattttggcaaaaaaaataccccgctttctacttatagtttagtggaaacaacggggtaaaacaatctttagtttgccagaggatcttgcagatgcttttttcaaccgttcattcttagatcctgccgtgaagggggaattccccgctgatttagtcgcgattttaaaagatctagccatcttacctgactatcaaccagctgacttagcattgattaaggcgaacactgtggatttattggggattaattattatcaaccacggcgcgtgaaggccaaggaaaccccaatcgaccatacaaacggcccgatgccggatgattttttcgacaattacgatatgccgggtaagaaagtcaatccgtatcgcgggtgggaaatctacgaacgtgggatttacgatattttgaaaaacgttcgcgaaaactacggcaacattgcttgctttatttcggaaaacgggatgggcgttgaaggcgaagaacgttatcgcaatgcggatggccagattaatgatgactaccggattgaatttgtacaggatcatttgaagtatgtccatcaagcccttcaagaaggcagcaactgtctcggttatcatatgtggacgtgtatggataactggtcatggaccaacgcctataagaaccgctacggttttattgcggtggacttagaccatgattgccaacgggcgattaaaaaatcaggtcattggttcaagcaagtcgctgatcaaaatgggtttgaagcctaatcgaattgaaaaagcacaatcgacgaaacaatcgttgattgtgcttttttgtctgttatattcgggtaaacttgataaccatcaagttcttaaaatcggctttcttctatactaaagacaatcgttaggaagaagggattttaaatgaaatttcaaagatggttacaatccgtgaagaatcagattgcgctgactgttggcggattgattgcagtggcctatagctggtattggcttggtggggcggtaattgtgatgcaagggctgttattggttgcgtcaatgatgggggttgcaccgattttgatgcaggcgtatcaagcgctaaaagtgaaagtcatcagcattgatttgctggtcacgattgcggtattgggagcgctaatcattggtgagttcaatgaatcggcgattgtcacgttcctctttttattcgggagctatcttgaacaacgaaccttgaaaaagacacgagaatcaattcgcgcattgtctgaaatggcgccacaaacggcacaagtgttagcggccgatggcactactacgacggtagatgttgatgatgtcgaaatcgatgatcaagtattggttaaagctggcgctcaggtgccggttgatgggcaagtcgtccaaggtagtgcctatgtcaatgaagctagcatcactggcgaagcacaactcgttaagaaaatagtgggtgatgctgtttattccggggcaattgtggataacgggacattgacggttaccgcaacgcaggttggggatgatacaacttttgcccaaattattgaattggttgaagaggcccaagatagtaagtcacccgcggaaaaattcattgatcgttttgcgacgtattacacaccggccgttttagtgttggcattagcgattggcttaatcacgcgcgactttaaactcgcgattacgattctggtgcttggttgtccaggtgcgctagtaattggtgcgccagtttcaatcgtggcggggattggcaatggcgcgaagcatggggttttgattaaaggcggcgaagtcgttaatgcgatggctggcattgatacgatggtctttgataaaactgggacattgactaaaggggacacggcagttgcacatgtgcaattttatacagcggcagaacaagcaacgttggcagtgactaccgcggttgaagcacagtcagatcatccactggcgactgcgattgtgcagtatgcacgggaacgaggggtgacagacttaccaactattgaacgaattgaaacgctcaaagggttgggggtacaagctgaagtcgctggtcaaacaattcggattgggcgggccaagatgatgactgaagcagggatccggttaaccggtgcgcagattgcggcgatcacggccagtcaaacagcagggcaatcaaccgtgttagtcgcagttgaccaacaagttgttttattaattgggattgctgatacggttaaaccggaagccaaggcagcattaacgcgtttgaaaaaagcgggcgttaaacatttagtcatgttgacgggcgataatgaccagacggccgcagcaattgccaaagccgtcgggattactgaataccacgcgaatcttttgccggcagagaaggttgaattcattaagacctaccaagcaaacggtcaaaaagtggcttttatcggggatgggattaatgatagtccttcgcttgcactggctgacattggaattgcgatgggttctgggacagatgtcgcgattgagacatccgatattgtgttaatgcaatcgacgttatccgaattagtgtatgccgattacctcacgaaggcgacggcacgtaatacagttcaaaatattgtgattgctgttggaacggtcggattgttattgcttggcctgatgcttggctgggtacagatggctagtgggatgtttgttcatgagattagtattctggtcgtgattttcaatgcgatgcgcctgattcggtttaaagttcgctaaacttgatggcggtcaatttttaatcatgcagcgcgcgatatagtaacagtaatcaaacgaaaaggtggtcattgaaatggcaaaattggtgatgcaattagacgagctatcatgtccgtcatgtatgcaaaagattcaagcgggtgtcagtcaacaagatggggttgaatcagtgaaagttctctttaatgctagtaaagtgaaagcagaatacgatgaagccgtgacaaacccagatgaattaacacaagctgtaactgacttgggctacagcgttcaaagtatcaaagtgaaatagggggcaattaatatgttatctaatgaagaaatcgaaacacgttaccaagcagaagttaaacaagctgatgttgatcaccatacaccaaccgcgggtgccatgatcggccatgtgatggctaacttaacgattcaacggcgtaaactccgtcaaatgaagtggtacgctaaaggaatcaataaccaagcttttaaagcgcaattaaccacattgcttgcagaaaatgatatgctattagacaagacggccgaacggctactagacgaaggtgaagtgcttccgacgacgcaagctgagtataccgagtatgggatgctgacagaagagccgcggattaagtactgggagatgccagcgatgattgcggaaatggttgcggactataatactgctaatctatttgtttcccgtgcgattaaacttgcggaaaaagaagaacgatttgctttagcggcggatatggtttctttaatgggctacaaccaacaccaaatccgtgaattgcaaagccaactaggaaaagcagcgcgcgaaggattagatgaagaagacgacgattaagatagagggaagtgggctaggtgactgacgaacaacatatttgtgctgagatagtaccgatttttaatcatttagaccgtgatagtttggtcaagatttcggcagttacccatcatgaacgcgttaaaaaagggacgttggtgatgagcccgatagatcagaagcggttagtgatcttagctaaggggagcattaaggtctatcagctctctacagcaggcaaagagcaactgctacgcatgatggaacccggtgattttgaaggagaaaagttactttttaaaacggaagatgagccgttgtacggtgaggtcttgcaagatagtacaatctgtacgttatcgcggagtgattttcaacagttactgttagcctatcccgaaattagtttaaagttactagaagcaactactgataagatgacgcgtttggaaaaacaggcgaacttaatcaatatcgagtcagttgaatccagaatcgtgacttatctacttgatttagctaaagcgagcggagaaactgaagtgatgattccgatgaagttaaaagaactggcaacatatattggaacaacgcctgaaaccttatcgcgtaagttaaaacagttagaaagtcatgcgctaattgaacgaaacggtcgaaagattgcgatattagactatgaaaacctagaagacttctattaggacgtgaagattctgcgaattttgcaggatctttttgtttacctataccaatttggataaaattggaacaaatagcagtttaaaagtattatgagggataatcaatagcgcagattagggatgagaatccgggtgatatgaattattttttcgatatttatacaggaattcaatttttttgaatttttttcaaattagtgattgacgttgtcccactaggatggtaagatattctatgtcgtcgagagatgagcatgtagcaaaacgttgaatgaatattacttaaaaaaagttgttgacattcgggtttatacatgataagatagattgtgttgcttatgagttttaacttaataagtgattaactaatatctgatgtagacctttgaaaactgaacaaagtttcgacaaaccaaatgtgtagggtcgcccttcggggcacaaaacatatttgcaaagtcaatttcgctagcaaataaattaagtaacaaaacaagagctacaaacttttaatcgagagtttgatcctggctcaggacgaacgctggcggcgtgcctaatacatgcaagtcgaacgcactctcgttagattgaagaagcttgcttctgattgataacatttgagtgagtggcggacgggtgagtaacacgtgggtaacctgccctaaagtgggggataacatttggaaacagatgctaataccgcataaaacctagcaccgcatggtgcaaggttgaaagatggtttcggctatcactttaggatggacccgcggtgcattagttagttggtgaggtaaaggctcaccaagaccgtgatgcatagccgacctgagagggtaatcggccacactgggactgagacacggcccagactcctacgggaggcagcagtagggaatcttccacaatggacgaaagtctgatggagcaacgccgcgtgagtgaagaaggttttcggatcgtaaaactctgttgttggagaagaacgtatttgatagtaactgatcaggtagtgacggtatccaaccagaaagccacggctaactacgtgccagcagccgcggtaatacgtaggtggcaagcgttgtccggatttattgggcgtaaagcgagcgcaggcggtttcttaagtctgatgtgaaagccttcggctcaaccgaagaagtgcatcggaaactgggaaacttgagtgcagaagaggacagtggaactccatgtgtagcggtgaaatgcgtagatatatggaagaacaccagtggcgaaggcggctgtctggtctgtaactgacgctgaggctcgaaagcatgggtagcaaacaggattagataccctggtagtccatgccgtaaacgatgagtgctaggtgttggagggtttccgcccttcagtgccgcagctaacgcattaagcactccgcctggggagtacgaccgcaaggttgaaactcaaaggaattgacgggggcccgcacaagcggtggagcatgtggtttaattcgaagcaacgcgaagaaccttaccaggtcttgacatcctttgaccactctagagatagagctttcccttcggggacaaagtgacaggtggtgcatggttgtcgtcagctcgtgtcgtgagatgttgggttaagtcccgcaacgagcgcaacccttattactagttgccagcatttagttgggcactctagtgagactgccggtgacaaaccggaggaaggtggggacgacgtcaaatcatcatgccccttatgacctgggctacacacgtgctacaatggatggtacaacgagtcgcgagaccgcgaggtttagctaatctcttaaaaccattctcagttcggattgtaggctgcaactcgcctacatgaagccggaatcgctagtaatcgcggatcagcatgccgcggtgaatacgttcccgggccttgtacacaccgcccgtcacaccatgagagtttgtaacacccaaagccggtgaggtaaccttcgggagccagccgtctaaggtgggacagatgattagggtgaagtcgtaacaaggtagccgtaggagaacctgcggctggatcacctcctttctaaggaataatacggaaaaccttgtacatttgcgaagtcgaaactttgtttagttttgagaggtctactctcattgaattaggacgttttttgggcctatagctcagctggttagagcgcacgcctgataagcgtgaggtcgatggttcgagtccatttaggcccattgtactaagaattaaatagtaccaacacgggggattagctcagctgggagagcgcctgctttgcacgcaggaggtcatcggttcgatcccgttatcctccattgatgacaatagtcatcgaaactttgttctttgaaaactggataataagtaatatattagttttaaaagccgagaaaacattgcgttttaaagagttttttaatagaaatatgaattagttcatatcgctaaactcaaataataaccctttaccgtaggtaaagttaggttaagttataaagggcgcacggtggatgccttggcactaggagccgatgaaggacggtactaacaccgatatgcttcggggagctgtaagtaagctttgatccggagatttccgaatgggggaacccaatacctttagtcgggtattatcattaagtgaatacatagcttaatgaaggtagacgcggggaactgaaacatctaagtacctgcaggaagagaaagaaaaatcgattccctaagtagcggcgagcgaacggggaagagcccaaaccaagaagcttgcttcttggggttgtaggacagaacattggagttaccaagttaagttgtaatcgaatcagctgggaagctgagtcaaagagtgtgataaccacgtagattaaacaacttaacctccgttctggatcctgagtacggcggaacacgtgaaattccgtcggaatccgggaggaccatctcccaaggctaaatactccctagtgaccgatagtgaaccagtaccgtgagggaaaggtgaaaagcaccccggaaggggagtgaaatagatcctgaaaccgtgtgcctacaattagtcaaagctcgttaatgagtgatggcgtgccttttgtagaatgaaccggcgagttacgtttatatgcgaggttaaagtgaaaagctggagccgtagcgaaagcgagtctgaaatgggcgagtgagtatatagatgtagacccgaaaccaagtgacctacccatgtccaggttgaaggtgtggtaaaacacactggaggaccgaacccacgtcagttgaaaatggcggggatgaggtgtgggtagcggtgaaattccaatcgaacttggagatagctggttctctccgaaatagctttagggctagcctcggaatattggatcatggaggtagagcactgtttggactaggggcccgtcatgggttactgaattcagataaactccgaataccattgatttagttccgggagtcagactgcgagtgataagatccgtagtcgaaagggaaacagcccagatcaccagttaaggtcccaaaatttatgttaagtggaaaaggatgtggcggtgcacagacaactaggatgttggctcagaagcagccaccatttaaagagtgcgtaatagctcactagtcgagtgccgctgcgccgaaaatgtaccggggctaaacataataccgaaactgtgggtggacacgtaagtgtccgcggtaggagagcgttctaagggcgatgaagctagatcgtaaggactagtggagcgcttagaagtgagaatgccggcatgagtagcgaaagatcagtgagaatctgatccaccgtatgactaaggtttcctggggaaggctcgtcctcccagggttagtcgggacctaaggcgaggccgaaaggcgtagtcgatggccaacaggttgagattcctgtactagtttattttgtttgaacgatgaagggacgcaggaagctaaggaatgcacacgactggaaatgtgtgtctaagcaacaagtcttgagttgagtgaaatgcttgattctttaaggacaagttgtgatggggagcgaaattaagtagcgaagttcctgatgttacactgccaagaaaagcttctagtgagaaataaactacccgtaccgtaaaccgacacaggtggtcgaggagaatatcctaaggtgagcgagtgaactctcgttaaggaactcggcaaaatgaccccgtaacttcgggagaaggggtgctgaccgtcaggtcagccgcagtgaataggcccaaacaactgtttatcaaaaacacaggtctctgcaaaatcgaaagatgacgtataggggctgacgcctgcccggtgctggaaggttaagaggatgagttagcgtaagcgaagcccagaattgaagccccagtaaacggcggccgtaactataacggtcctaaggtagcgaaattccttgtcgggtaagttccgacccgcacgaaaggcgtaatgatttgggcactgtctcaacgagagactcggtgaaattataatacccgtgaagatgcgggttacccgcgacaggacggaaagaccccatggagctttactgtagcttgatattgagtgtttgtacagtttgtacaggataggtaggagccgtagaaatcggaacgctagtttcgatggaggcgttggtgggatactaccctaactgtatgaccactctaacccgcgccacttagcgtggcgggagacagtgtcaggtgggcagtttgactggggcggtcgcctcctaaagtgtaacggaggcgctcaaaggttctctcagaatggttggaaatcattcgtagagtgtaaaggtataagagagcttgactgtgagattgacaaatcgagcagggacgaaagtcggacttagtgatccggtggttccgtatggaagggccatcgctcaacggataaaagctaccctggggataacaggcttatctcccccaagagtccacatcgacggggaggtttggcacctcgatgtcggctcatcgcatcctggggctgtagtcggtcccaagggttgggctgttcgcccattaaagcggtacgcgagctgggttcagaacgtcgtgagacagttcggtccctatccgtcgcgggcgcaggaaatttgagaggagctgtccttagtacgagaggaccgggatggacatacctctggtgtaccagttgtgccgccaggcgcatcgctgggtagctatgtatggacgggataaacgctgaaagcatctaagtgtgaagcccccctcgagatgagatttcccattcctttatggaagtaagacccctgaaagatgatcaggtagataggctaggagtggaagtacagcgatgtatggagcggactagtactaatcggtcgaggacttaaccaaaggtgcaatgttaggcttttgaaatgaaatattacttattatgcagttttgagagaacgaagttcttctcagtgcgcaagcacaaaatagtgtggtggcgatagcaagaaggatacacctgttcccatgtcgaacacagaagttaagcttcttagcgccgatagtagttggtgggaaactacctgcgaggataggacgttgccgcgctttttattgatggaggtttagctcagttgggagagcgtctgccttacaagcagagggtcacaggttcgagccctgtaacctccattgagtcgttagctcagttggtagagcatctgacttttaatcagagggtcgacagttcgagcctgtcacgactcatcggccaagttacacgccaaaatgcgggtgtggcggaattggcagacgcgctagatttaggttctagtgtctatatagacgtgggggttcaagtcccttcacccgcattcaattgaatattcaatgaaagttatcttattatgccgacttagctcagttggtagagcatctgatttgtaatcagagggtcgggcgttcgaatcgtctagtcggcattaagatgcggaagtagttcagtggtagaacatcaccttgccatggtgggggtcgcgggttcgaatcccgtcttccgctttcattatgattaagccggggtggcggaactggcagacgcacgggacttaaaatcccgcggtaggtgactaccgtaccggttcgattccggtcctcggcatcataatgaaaaatgcacccatagcgcaactggatagagtgtctgactacgaatcagaaggttgtaggttcgactcctactgggtgcatataacgggaaatagctcagcttggtagagcacctggtttgggaccagggggtcgcaggttcgaatcctgttttcccgactggatacaaaaatattaataaaaaatgcggaagtagttcagtggtagaacatcaccttgccatggtgggggtcgcgggttcgaatcccgtcttccgctttttttgtacccgtaataaaatagtttccgggaagtagctcagcttggtagagcactacgttcgggacgtaggggtcgcaagttcaaatcttgttttcccgactctcaaagacttgttgatgacaagtctttttttgtgcgtccaattgattagctactaaaagtcagtaaactttcattttgtactgataatcgttataataatagtcaacgttagtcaaagttaaacttttgacactgaaaaacgcagaagactaaatgaaggggctgatatgtttgcaaagtcagaacatctcggatattattgaagcctatctaaaaaagatactggctgacaatgaacaaatcgaaattagacgctccgaaattgctaagctttttaattgtgtgccgtcccaaattaactatgtgattaatacgcggttcactgagcagcgcggttatgtcgtgaatagtaagcgtggcggcggtggttatattcggatcgtcaaggttcaatttctcgatgatcgggactttttagaagcgttaattgaaaatgttgatacgcagatttcccaggcggacaccttagccattatccagaaactatatgatgaacaaattctttcgcaaaaggaaggcaatttgatactcgcggcaacgagtccacagacattagcggttaataataaacaattagaagagcagcttcgagcacagattctagttgcagtgttagaacgactacgatatgaaattaagtaaagagtgggggattatccatgaataatctatttacaccaagtgcaaaaaacgtcttaatgatggcacaagaacaagcaaagaaatttaatcaccatgcactaggaacggaacatctcctattagcaatcgtattagaaaatgagggaattgctgggactaccttacgcgaattaggtgtcaattcgaccgatgtccttgaagaaattgaacgcttaaccggatatggcgatgctgtaatcgcttctggcattggcggttatttaccatattcgcccaaagccaaacaagtactcgatattgctcgggttgaagcgcaacaagctaattcggttaaaattggcacagcacacctattattagcacttttacgtgatgatgatattatcgctgcgcggatcttattgaacttaggacttagtttagctaaaacacgccaactactacttcaaaagatgggtgtggatacggcaaccgctaaaaaacgggctaaagcagctaagaataatgccgatcaagctgggacaccaacgttgaaccaattagcgcgcgatttaacacaacttgctcgtgacaatcaaattgatccggtcgtgggtcgtgatgaagaagttcggcgacttgtgcagattttagcccggcgttcgaagaataatcccgtcttagttggtgaacctggtgtcggtaagacagcgattgctgaaggttttgcgcaacgcatcgtcaatggcgatgtgccaagtgacatgcagcaaaagcggctcatgatgctcgacatggggtcattggttgctgggacaaagtatcgtggtgaattcgaagatcgtttgaagaagattatcgatgaaatctatgcagatgggcaagtgattctctttattgatgaattacacaccctcattggtgcaggtggcgctgaaggggcaattgatgcttctaatctcttgaaaccagcattagcgcgtggtgaattacaattaattggtgcgacgactttagatgaatatcaaaagtacattgaaaaagatgcagctttagagcggcgattcgcgaccgtcacggtcaatgaaccaacgccagaagatgcggaacaaattttaaagggattacgtccacgttatgaagctcatcatgggattgcaatttcagatgaagctttacatgaagcggttgtcttatcaaatcgctacatcacgaaccgattcttaccggataaggcaatcgatttaatggatgaagcgacggctaaggtgcgcttggatgctgttaaccagaagacaccgtcggataaattagaacaaaaactacaaactttaaatgacgataaagaagccgctgttcgcgcgcaagattttgaaaaagcggcgacgattcatgagcaagaagtaaccactaaggccaagattgccaagttacaagctgccgaacaagaaaacggtgttcgcagtgacattcaagtgactgctgaagacatcgctcaagtggttgcgcaatggaccggtgtgcctgttactcagttgcaacgcaaagaaagcgaacgtctcatgcaacttgaaaaagtcttgcataaacgggttgttggccaagaagaagccatttctgccgtttcacgtgcgattcgtcgtgcgcgcagtggtttgaaagatccaaaacgaccaattggttcatttatgttcttaggcccaaccggggttgggaaaacagagttagccaaagcattggcggaagccatgtttggttctgaagacaacttgattcgggttgatatgtctgaatatatggaacgttacagcacgagccgtttagttggggcggcccctggctatgtcggctacgaagaaggcggccaattaacagaaaaggtccgcaataaaccatattccgtcattttatttgatgaagttgaaaaggcccaccctgatatcttcaatatcttgttgcaagtcttggatgacggctatttaaccgattcaaaaggacgtaaggttgatttccgtaatacgatcatgattatgacatcaaacttaggtgcgacagccttacgtgatgataaatccgttgggttcggggttaaagatgtaactgctgattataaagcaatgcaagggcgcattatggaagaattgaagaaagctttccgtccagaattcttaaaccgaattgacgaaacggttgtcttccattccttaacacaacctgaattgcgcgaaatcgtgaagattatggcgaagaatgtcttgggccgtttagcggaacaagggattcaaatcaagatgacagctgcagcgatggatgttgttgccaaagctgggttcgatcctgaatatggggcacgaccaattcgacgggcgctacaaacccaagtagaagatcagttgagtgaagcgttgcttgctggcgagattacgatgggtgtaccggtgacaattggcgcaactaaaggtaaaattaccattaccagtaagactgataaagtaactgtttaaacgtaaataaggtgtcagaccaattggtctgacaccttatttttttgccctaaaagggtcgtgagctgttcaatttcagttttaatcgcagcgccgatattcgtttgactgacacgttgacgttgactaacttgatcaatcactcgacgcgtggaaataatgtcttgcatcttggcaattgcattggctcgtgtggtgaacggctgatgggtgactaactgcattccatacgaattgtacaggagcgtaaagccaccaatgccagttgtgtggtgataagcttttgaaaagccgccatcaatcacgatcattttgcgattagccatgattggattgtggccttttttgacaggtgtgtgaccattgagaatgtgccccgtttctggcgttaagccaaactccaacaagagtttctcaatgaagtcttcctgatggcggagttggtaatatgcgttcttcttttcttcgtgtaaaacggggtcggcgctgaagtagcgttcgaaggtcgtcatcgcgttcttgccaaatagtggggagagcggtcctgtccacaggtaccagagtaaatcggtggataaattatcttgattgagcgggtggtcgaagctcattcgaatttggtgatcgaagaagtcgagtaatgatttaccagcgtattgtcggttagcgagggttaacgtgaggaagttgccggcttcatcaactggaatacagccgtgaaaaaggagattctggttgtagagttggtacatgttaccgttgtcgattaaaaaacggagatgcttgcgtagtttttggcagtgggtaaacgtgtttagcaatgatgtaacaatggctgcttcatcggaagttaatatttcggggtgtgtggggtcgattgtttgaaagcaggtgttatcaagtgggtagtcatgaccatttagatgaattgtctgctgttcaaagtcaacatggctgaggattaagcggtggtccattttgaaatcaggattgcgtttaatcacggtttgttccaacttaaactgcatgatggcgatggcttggtgcacttggttgatgcttttcttttcagctgttgagattgcgggttgattggcagcaacctttggttcgaaggcgggattgggctgataagttcgttgggcaaactgaaccagttcgctaaggtcaattccgtaagctttctcgatgatggctaaattattgtagcgtgcgcaaatgcgtaaaaggttgagcatacatagttgagaaccgctagcggcgccgaaccagagaatatcatgattgccccactgaatatcaaccgcagggagcttggtgagttgttcgacaatcagatcgggacgcggcccacgatcgtaaatgtcaccgatgatatgccaatgatcaaccactagtcgttgaatcgtatgactggtggcgataattagggcatcggcttggcccatcgaaatgatggacgtcgtgatttcttggaagtagcgtttcttatcactgttagctacatcgccgtacattaattcttcggtaatgtagacgaaatcgggcgccattgctttacggacttttgagcgtgtgtattttgtggagacaaattttaagaggtcgattaaccgtttaaaagtggtgaggtaccactggtcgagttcactagcagatagttgtgcgtgtttgagtgcaagccgctcagttgggtagtaaactaaaaaagcgaacgcctgcattgtatcttcagtcatttcaccggaaaagacctctgtaattttttgccggagattccctgcgccagtgcgaatgagatgctggaaggcatcatattcgccatgtaaatcactcatgaaggcttcagtgggtttgggaaggttcaagatggcctttaagttgatgatttcggaagtaattgccattttagtggggtatttttcggataacgttttcattttgttgttaatcattcgccgagctcctttgataaactaatagttcgattataccaatcgtaaatataaatgcaaattactttgtttaaaaacattttattagtatataccaattaaaaaagtcgcgcagtttagcgcgacttctggaaactattgatcttggatggtgccatcaacgtggcgttcaactttcatttgcgtcattgggatgtagcccagtttagggacgattgtcttttgaacgtcttttgattggatgaagtggatgaaacgggctgtttgatagttaggtgcgcccttagtatacatatgttcgtaagaccagattggccatgcattggttgaaacgttcttttcggtaggttcaacgtcgtttaacttaacagcttgcaagttacctttgatgtatgggaaggcgaggtaactgatagcgcctggcgtttgttcgacgattttttgaacagtcccagaggaatcttgttcttggctggtaacaactttgtcggttttaagacctaatttttcaaacgtttgacgtgtcccacttccttgggcccggttgataacggtgattttttcgttaggaccaccaacggtttgccagtttgtgatttcgcctttaaagatgcctagcaattgtgcactggttaaatttttgatgcctaactttttattaacaacgggtgcgattgcaaccacagcaactttgtgatcaaccagtttcttagtatcgataccatctttttcttcagcgaagatgtccgagttaccgattgtgacgttgccaccactaatttgggttaaaccagttcctgaaccgccaccttgaacggtgacgttgactttagggttatccttttgatattgatcgccagcttgttcaacaaggggttgaagggctgtcgaaccaactgcagtaattttagcgccttgatcctggctttgacttgcactttttgattggccttgacaaccagctaataaaagagcggccgcgccaactgtgagtaatgccatactaatgcgtttcataatgattcctcctgaggactgatttaagggtacaagttcagtatagagacgtcgtgtaaagattgaccgctaattcgtgtaaaaaacgtaaatgataagtcgcgagtttgtaaatgattccgtgaggggcttgaagattgtatggctgcttattgtgccaatcgagctattttagcgccaattgaatgtgcagaaaagtcgggctattatatggaagtaaaagaacattatggacgctaaattaagggatgaataacccgaggcagattattgacttttagtagtaaaagaagtatattatacagtaactgcgaaaatccgtagaaaaatttattgtgctgatctattgtccagcacggtattcatgaaaaacaaaaatagttagtctgatttattcagcttaaaataactgtttttgttttttttctgctcaaaattacctaaaaatggcgatgtaatattttcttaatatttgtcatatttttgtaataatgaggctgcggaaaacttatagaggggtgaacaatttggcaggacacttagtgaattacggtaaacatcgtactcgtagaagctacgcacggattaaagaagtgctagaactaccaaacttgatcgagatccaatctaattcctatcaatggtttttagacgaagggcttcgtgaaatgtttgatgacattatgccaattgacgattttgctggtaacttatcattagaattcgttgattaccaacttcttgaacctaaatacacggttgaagaagctagacaacatgatgccaactactcagcaccattacacgttactttgaaattaacaaaccatgaaactggtgaaattaaatctcaagacgttttctttggggacttcccattgatgactgaccaagggactttcatcatcaacggtgctgaacgggtaattgtttctcaattagttcgttcaccaggcgtttatttcaacagcgctgttgataaaaacagccgcacaacttatggtacaactgtcattcctaaccggggtgcatggttagaatttgaaacagatgctaaggatattgcatatgttcggatcgatcggacacgtaagattccaatgtctgttttagttcgtgctttaggttacggttctgatcaagaaattatcgatatcttaggcgacaacgattcattaatgttgacgttagaaaaagatatccataagaatactgacgactcaagaacagaagaagctttgaaggatgtctacgaaagacttcgcccaggcgaaccgaagacagctgatagctcacgttcattactttatgcacgtttcttcgatgctaaacgttatgatttagctgctgttggtcgttacaagatcaacaagaaattaagcttaaagacgcgtttattgggtcaaacattagctgaaacacttgctgatcccgatactggtgaagtgattgctgctaaagatacagttgttgatcgtcaagtgatggatgctttggcaccatacttagacaaagaagacttcaagacggttacttaccaaccatctgatgaaggtgtcttaccagaaccaatgacactccaagtgatcaaagtgtactcacaaaaaacacctgataaagaaatcaacttaatcggtaacggtcatatcgatgccaagattaagcatgtcattcctgctgatatcatcgcttcaatgaactacttctttaacttacaagaaggtctcggttcaacggatgatattgatcatttagggaatcgtcggattcgttcagttggtgaattgttacaaaaccaattccgaattggtttatcacggatggaacgtgtggttcgtgaacggatgtcaatccaagacacaagcaccgtgacacctcaacaattgatcaatattcgcccagttgttgcctcaattaaggaattcttcggttcatcacaattgtcacaattcatggatcaaaccaatccccttggcgaattgacgcataaacgtcgtctatctgccttaggacctggtggtttgactcgtgaccgtgccggttatgaagttcgagatgttcactatacccattatggtcgtatgtgcccaatcgaaacccctgaaggccctaatatcggtttgattaacagtttggctagttacgctgttgttaaccgttacggcttcatcgaaacaccatatcgccgtgttagttgggatacgcatgatgttactgataagatcgactatttaacagccgacgaagaagataactatgtcattgcgcaagccaactcaccattaaacgatgatggttcattcgttgatgatactgttttagcacgttacaaagatgacaatattgaaacttcaatcgacaagttagattacatggacgtttcgcctaagcaagtagttgctgtcgctacggcctgcattcctttcttggaaaatgatgattcaaaccgtgccttgatgggtgctaacatgcaacgtcaagctgtgccattggttgacccacatgcaccacttgttgggacagggatggaatataaagcagcccacgattcagggattgctttattagcacaacatcccggaactgttgaatacgttgatgcgaaagtcattcgcgttcgtcgtgaagacagctcattagatacgtacgaattaatgaaattccgtcgttcaaatgctggtaagaactacaaccaacgtccaatcgttgcaaaaggcgatcacgttgatgttgatgaaattatcgctgatggaccagctatggaaaaaggtgaattagccttaggtcaaaacccattgattgctttcatgacttggaatatgtataactacgaagatgcgatcgttctttcagaacgtttagtgaaagaagatttatatacttcaatccatattgaagaatacgaatcagaagctcgtgatacaaaacttggacctgaagaaatcacacgcgaaattcctaacgttggtgaagattcattgaaggatcttgacgaattcgggattgtccgtgttggtgctgaagtcaaagatggcgacattttagttggtaaggtaacgcctaagggtgtgacagaattatcagccgaagaacgcttattgcacgctattttcggtgaaaaggctcgcgaagttcgcgatacatcattgaaagtacctcatggtggcggcgggattatccaggacgttaagatctttacgcgtgaagctggcgatgaattgtcaccaggtgttaacatgatggttcgtgtttacattacacaaaaacgtaagatccaagtcggcgataagatggctggtcgtcatggtaacaaagggactgtttcaatcgttgttcctgaagaagatatgccatacatgccagatggtaccccagttgatatcttattgagtcccatgggtgtgccttctcgtatgaatatcggacaagttcttgaattacatcttgggatggctgctagaaacttaggcatccatgttgcaacaccagtctttgatggtgcgcaagataaagatttatgggacgctgttcgtgaagcaaacatgccttctgatggtaagagcattctttatgatggtcggaccggtgaaccattcgatacacgtgtgtcagttggtgtcatgtactacatgaaactagcccacatggttgacgataaactccatgcacgttcaatcggaccttactcacttgttacgcaacaaccattgggtggtaaagctcaatttggtggccaacgtttcggtgaaatggaagtttgggctcttgaagcttacggtgccgcttataccttacaagaaatcttaacttacaagtctgatgacgttgttggtcgtgtgaagacatacgaagcaatcgttaagggtgaaccaattccaaaaccaggtgttccggaatcattccgagtattggttaaagaattacaatcacttggcttggatatgaaggtcttggatatcgataatcaagaaattgaattacgcgatatggacgacgatgatgatgatatcgaaaacatcgatgcattatctaaatacgctaaagaacaagaagccaaaaaggcacaagaagaagctgaaaaagcacaagcagcaaatgctgatgcagtagatccatctgctgaataaagcgtgctataaattatgaggaggtcggccctttgatagatgtcaataagtttgaaagtatgcaaattggtttagcatcttcagataaaatccgtagttggtcgtatggtgaagttaaaaagccagaaacaatcaactaccgtactttaaaacctgaacgtgatggcctttttgatgaacgaatcttcggacctacgaaagattgggaatgtgcttgtggtaagtacaaacgaattcgttataaaggaattgtctgtgatcgttgtggcgttgaagttacacgttcaaaagtgcgtcgcgaacgcatgggacatatcgaacttgcagcaccagtaacacatatctggtactttaaagggattcctagccggatgggtcttgtcttagacatgagccctcgtgcattggaagaaattatttacttcgcatcatacgttgtgattgatccaggcgatacagccttagaaaagaaacaactgatgaccgaacgtgaatatcgtgaaaaattagatgaatacggtaatcgttttaacgctaagatgggtgctgaagccatcaaagaattgttacgtgacgttgatcttgaaggcgaagttgctgaattaaaggaagacttgaagtcagcacaaggtcaaaagagaacgcgtgctatccgtcgtttggacatcttagatgccttccgtaaatcagggaataaccctgaatggatggttatggatgctattccagttattccaccagatttacgtccgatggttcaattggaaggtggccgttttgccacatctgatttgaatgatttgtaccgtcgtgtgatcaaccgtaacaaccgtttgaaacgtttgttagacttgatggcaccaagcatcatcgttcaaaacgaaaaacggatgttacaagaagccgttgatgctttgattgataatggtcgtcgtggccgtccagttactggacctggtaaccgtccattgaagtctctttcacacatgttgaaagggaaacaaggtcgtttccgtcaaaacttacttggtaaacgtgtcgattattctggtcgttccgttatcgatgttggtcctacattgaagttctatcaatgtggattaccacgtgaaatggcacttgaattgttcaaaccattcgtcatgcacgaattagtgaaacgcgatatggcttcaaacattaaaaatgcaaaacgtaaaattgatcgtcaagatgacgatgtttgggatgttttagaagatgtcatcaaggaacgcccagttctattgaaccgagcacctacattgcatagacttggtatccaagcattcgaaccaatcctggttgatggtaagtcaatccgtcttcatccattagcttgtgaagcttacaatgccgatttcgatggggatcaaatggcgatccacgtacctttatctgatgaagcacaagcagaagcaagaatgttaatgcttgccgctcaccatattttggcaccaaaagatggtaaaccaatcgttacaccttctcaagacgttgttttagggaactactacttaacgcttgaacaaaaaggtagtctcggcgaaggcatgatcttcaaagatacaaacgaagttttaatggcttatcaaacaggtcacgttcatttgcacagtcgaattggtttgtcagttgttgatatggataatcgtccattccctgacgaacaacgccacaagattatggtaacaagtgttggtaaagtgatgttcaacgaaatcatgccaactggcttcccatatttgaacgaaccaacaacagataacttgatgaatggtgtgccagataaatacttcatcgataacggtgaagatattcatgactacctctcaagtgccccagtgatcttaccatttaagaaaggcttcttaagtgatatcatcgcgcaagtcttcaaggtatataaggttcaacggacatctgacttattggatgatatgaagaccttaggttacgttcaagcgacccatgctggtttaacagttggggttgccgatgttcctcaattacctgaaaaacaagaaattgttgatgaagcccataagaaagtcacaacggtttctaaacaattccgtcgtgggttgattacagatgaagaacgccatgcgcgcgttattgaaatctggaacgatgctaaagacgatatccaacaacgactcacagattcgtttgatccaacaaacccaatctcaatgatgtctgattctggtgctcgtggtaacatctctaactttacgcaacttgctggtatgcgtgggttgatggctgctcctaatggtgggatgatggaagttcctgttacatcaaacttccgtgaaggcctctctgtcatggaaatgtttatgtctacccatggtgcccgtaaagggatgactgatacggcgcttaagactgccgattctggttacttaacacgtcgtttagttgatgttgctcaagacgttatcattcgtgaagaagattgtgggactgatcgtggtcttctcattcactcaattcgcgaaggtaatgaattaatcgaaccattgtatgaccgtcttgttggtcgttgcgcaatgaagaccattgttaacccaacaacgggtgaagtgatggttcaacgtaaccaattaatggatgaacaacttgctcaagctgttgttgatgccggtgttgaagaagtcacaattcgttctgtcttcacatgtaacacaaaacacggtgtctgcaaaaaatgttacggtcgtaacatggccaacggcgaagaagttgaagttggtgaagcagtcggaacagtcgcagctcaatcaatcggtgaacctggtacgcaattaaccatgcgtaacttccataccggtggggttgccggcggtgaagatatcactcaaggtttgcctcgtatccaagaaattttcgaagcgcgtaatcctaaggggcttgcaacaatcactgaagtaactggtgaagttgttgcggtggaagaaaaccctgcagaacatacacgtgaaatcactgttcaaggtgaaacagatacacgttcatatagtgtgccttacacagccaacgtcatcgttaacgaaggcgacatggttcgtcgtggttctaagttaacgggtggttctgttgatcctaaacaattaattaaagtccgtgacgtcttatcaactgaaaactacctcttgcatgaagttcaaaaagtttaccgtatgcaaggtgttgaaatcggcgataaacacgttgaagttatggtccgtcaaatgctacgtaaagtccgtgtcatggatccgggtgatacagaaatcttacctggtacattaatggatattagtgaatttacagaccgtaaccacgaaaccttaattagcggtggcgtacctgctacttgtcgtcctgtcttgcttggtattacgaaagcatcattggaaacaaatagtttcttatcagccgcatcattccaagagacaacacgtgtcttaacggatgcttctatccgcggtaagagcgatccattacttggtttgaaagaaaatgttatcatcggtaagattgtcccagctggtactggtatggcgaagtatcgtcatatggaacctaagacagtcggcgctgtatcagaaaatgtctactcaatcagtgacatcgaagcacagatgaaagaagaaacaaaagaataactgagtgccaatttagaacagttgctctaaattgcacgttaaagggcctcaccgacatggtgaggcccttttttatgtgtttgcaataaacaaaacgattaagacaccgtagctgatatacgggacaaatggaattgggcggcgtccgactaaggcgaggacaactggatggtggagactatcaatgagatatttgattaaacagaggagacaggcaattaataacatggatagggtgacctccaatccaaaccacaacccaagaattgccaataattcaatgtcaccagtaccgatgccatctgaaaagtagttgatgacagataaggtgctgccaatcaatagggcactgagccaatggtttgtcggccagtagtcaataaacaaaggcataaaagccagtaccattggaactgggtatagagctgtatggaaaatatcgactaggctcaacaaataaaggataagcaataaatagccaatctgtggtgtgaaatattgactggctaaacaacacgctaacaagccgccaataacctcactagtaaaaaaatggtgctggattcgagtatcacaatagcggcagtgccctctgagaatgaggtaactgataattggacataagtcgtaccaagcgagggcgtgatggcagaagtcacaccgtgaaccaggccatgtgatggataaaccgagtggccaacgccaagcacaaacagttaaaaaagaggcgcaacacgcgccaataacaaaggttaaaaaatatattaacaaacgtgtcatctcctttatgataactacaaaaaaagggcgcaactttttctgaaaaactggcttatagcacgttgactttcgtagttgtgcatgctattcttgtagatgtgctttttacggaagttttctgatattcagacatgctgactgacgtctaaaaatgcattacaatccacgcaatctaggttgccatttttttatcgcaaaaaaagaaccacctggatgtgtggacttaaaactcaaaaataactttcagatcaaggaaggaggaaccttcaaatgccaacaattaaccaattggtacgtaagggtcgtaaatcaagaacttcaaagtctgatgcacctgcattaaactttggctacaacagtatgaagaaaaaagctacagataatccagcaccacaaaaacgtggggttgctactcgtgtgggtactatgacacctaaaaagcctaactctgctttacgtaagtatgcgcgtgtgcgtttatctaacttaatcgaagttacagcttatattcctggtattggtcataacctacaagaacatagtgttgttcttatccgtgggggccgtgttaaggatttacctggggtacgttatcacgttatccgtggtgctttagatactgccggtgttgacggtcgtatgcaaagccgttctaagtatggtactaagagacctaaaaaataacacacaaaaaaatttgaaaaagtcgattgaagtttaaatgacactgtgtgttacttcaaggacttaaatatcttgaggaggttatcaggatgccaagaaaaggctatgttgcaaaacgtgacgttttacctgatccaatgtacaattctaaattggtttcacgcttaatcaaccgcttaatggttgatggtaaacgtggtactgcgtcaacaatcttatacgatgcatttgatattattaaagaagaaactggtaatgaaccattagaagtgttcgaagaagctatgaacaacatcatgccagtacttgaagttaaagctcgccgtatcggtggttctaactaccaagtaccaattgaagttcgtccagaacgtcgtacaactttaggtttacgctggttagtaagctatgctcgcctacgtggggaacataccatggatcaacgtcttgcacgtgaaatcatggatgctgccaataacactggtgctgcagttaagaaacgtgaagatacacataaaatggctgatgccaaccgcgcatttgcacattatcgctggtaagattaacaaggttggctgttatatgtattcaaatcatataatggcctcttgttgtatatagcttaatattcgagaggagtaatattcacttatggcaaacaaacgtgaatttccgttagacaaaacgcgtaatatcggtatcatggctcatattgatgctggtaagacaacaaccacagaacgtatcttgtactacactggtaaaatccataagatcggtgaaacccacgaaggggcttcacaaatggactggatggaacaagaacaagaacgtgggattacaattacatcagctgctacaacagctgaatggaaaggtaaccgagttaatatcattgatacaccaggacacgttgatttcacaatcgaagttgaacgttcattgcgtgttttagatggtgcaatcactgtcttagatgctcaatcaggtgttgaacctcaaactgaaaatgtttggcgtcaagcaactacttatggtgttccccggattgttttcgttaacaagatggacaaacttggtgctaacttcgattactcaatgacaacattggaagatcgtttacaagctaatgcacatgctgttcaaatgccaatcggcgctgaagatgaattccaaggcgttattgatttgatcgaaatgcaagctgacatctatgatgaagatgaattaggtgctaagtgggatacagttgatgtacctgctgactaccttgaagaagctacaaaacgtcgtgccgaattagttgaagctgttgctgatgttaatgacgacattatggacaaatatttagaaggcgaagaaatttctaaagatgaattgaaagctgctattcgtcaagcaactatcgatttgaaattcttcccagttttcgctggttcagctttcaaaaataaaggtgttcaaatgttaatggatggtgttgtagattacttaccatcaccattagacgtacgtccttataacgctaaaaacccagaagatgattcagaagttgaattgatggctggcgatgacaaaccatttgctggtttagcatttaagattgctactgacccattcgttggtcgtttaacattcttccgtgtttatactggtacattacaatctggttcatacattttgaatgcaactaaagacaaacgtgaacgtgttggtcgtttattacaaatgcattcaaatcaccgtaacgaaattcctgaagtattctctggggatatcgctgctgcaatcggtttgaagaatacaacaactggtgattcattgactgacgttgatcatccattaatcttggaatcaatggaattccctgacccagttatccaagtttctgttgaacctgaatcaaaagaagatcgtgataagttagatcttgctttacaaaaacttgctgaagaagatcctacattcaaggctgaaaccaacaatgaaacaggcgaaacgcttatttctgggatgggtgaattgcatttggatatcatggttgatcgtatgagacgtgaatttaaagtggttgccaaaattggtgaacctcaagttgcttaccgtgaaacattcacaaaacaagcatctgcacaaggtaaattcgttcgtcaatccggtggtaaaggtcaatatggtgatgtttgggttgaatttacacctaacgaagaaggtaaaggcttcgaattcgaagacgctatcgtcggtggtgtggttcctcgtgaatacatcccatcagttgaacaaggcttgaaagaatcaatggcaaacggtgtcttagctggttacccattgattgacgttaaagctaagttatatgatggtagttatcatgatgtcgattctaatgaatcagcatttaagattgctgcatcaatggcattgaagaacgctgctaaacaagctggcgctgaaatccttgaacctatcatgaaggttgaagttattgctcctgaagaatatcttggcgatatcatgggacaagtaactgctcgtcgtggtgctgttgaaggtatggaagcacgtggtaatgcccaaatcgttaatgcaatggtaccattgtcagaaatgtttggttatgcgacaacattacgttcagctacacaaggtcgtgggacatttacaatggtatttgaccactactcagctgttcctaagagcatccaagaagaaatcatcaagaagaacggtggccaataagccgctaatcttaagtgattggtttcgattggaaaaggactcgtcattgcgacgagtcctttttttgtacgtaaaaatgcgattttacagtttcgtaaatgaaagttcatatttaattcataactggttggtattctgtatacatcagatgaattcctcccaagaaataatctgaaaaggtaaaaatgcttttcaaggtggttagcttttgagcataacatagcgaggataatgagcaacgaaggtgatcgttgtcttcgcgtagttaggtggaaaaagttaccttgaaaagcaagattaaatgaattttcattagacaattcctccctaaagaatccgtctaagtaaagcaccgccaatgagttatagtttaatggtaaaacgaaccggcccatttgaaattcctcccaagaacagtgaatggttttctggtgattgatagagacttgctttcgaaggcgcaaggatttgttgatcattaagactggttcatgcgggttcaatccccgctaactcgatttgccaccgccctggcaaaaaaactcaaactctttttcatataaacttctccaaaaaagggagttacgacaaaaatcacttttgtcgtaactccctttttgtgtttctaggcacggcttactgagttagttttgttttgtaggacgtgttttcaaactgcccatcagacgtttaacctttgcttgttcgatttcgcgggcggatagttgactatagtccgcttcgatagccagtttattgaaatcagctagccgttcaggcattaatgaacctgcatcgattgcggctcgtacggcgcaactgggttcgctttgatgctggcaatccttaaatcgacagtcctgtgcgagcgtctcaatatcagtaaagactgtcttgagtgccttagacatgctacttgtcatgccgagttcgcgcatgccaggagtatcgacgatgaaggccccgctagcagtttgataggcttgtcgattggtggttgtgtggcgccccttatcatcgtcagcgcgaatgccgctcgttaaaacggaaggctctttaatgagctggttgatcagggttgatttaccaacgccggatgagccgacaaatgtcacccattgtccagctgttaaatacggtttgaaagtcgctgcaacatttgatgccgtctggccagttgtgatgacgggaacgctgtcgaatgtcacacttgcgatggcgtcaagaaaggttgttagctcagagtcgctgactaaatcggttttactcaaaacaatcaccggtgttgcgccgctatcccaagccatcgttaaatagcgttgtaagcgcgcttcgctgaattcttgattggcggatgttacgatgaaaatcgttgcaatattggccgctaaagtttgaatccatagaatgggtacattgtcccgtcatttaagatagcagatgatcgttaaaagtcaaattagataattgtagctccgaggctgtttttaaaatgcgcgagtgcccattcttgcccgttcggtgtaaaagttgcgacagcagcggctggaattgttagtgggtaatttaagttgtatgccgagactgcagtgtggagcacgcaaatgtcggtgcaaacgccagtcagtgttaacgcgtcaatctcgcgctcgcgtaagaaattatccagattagtgttagcaaatgctgaatagcgattctttgcaaatgcatagacgtgaggatcggtttggtgcttggtgtaccagctagctagtggtccgtaaaactcatggccccaagtattggctagattatgtggtgggaatagggcgctctctggatgaaatggatcatccttgacgtgtaaatcagtcggtaagatgacgtaatcaccggctgctaggaactggttagctaattcgataattacaggaacgattttctgagcgggtttgccggctgtcagagcaccgtttgggtcaacgaagtcatttgtatagtcgataatcaaaagtgcgttatgggacatgataaggacctcctggaggggatttaagttgctttcagtgtatcaaaacatggctagaaatccacgaatgacgcttgctacaagatttatgaaaatgttatgaaaaactttgataaatcagcaaaaaagggttgcgttatcgggttgtatcttgtaagatagataaagtgctatttccatagcaggagtgcgcaccatggtagtcaaaaagattaccgagtagctaagatgtgagaggttgcgacacacccggccgctttgccatgggcgggcgtgccggaaaaattttcacggagctagtctacttttaaaatagacgaaggagggaaaaacatggcaaaacaaaagattcgtattcgtttgaaagcattcgaacaccgtattttggatcaatcagctgacaagattgtggaaacagcaaagagaacaggtgctactatctctggcccaatcccattaccaactgaaagaacactttatacagtgcttcgttcaccacataagcataaagattcacgtgaacaattcgaaatgcgtacacacaaacgtttaatcgatattgttaaccctacacctaagacagttgattcattgatgaaacttgacttaccaagtggtgtagatatcgaaatcaagctttaattcgtaccaaccaattaaaaatactagaaaagaggtgttaccatgaccacaaaaggaatcttaggtagaaaagtaggtatgacacaagtctttactgaaaacggcgaattaattcccgtaacagttatcaaagcaactccaaacgttgttttacaagttaaaacaaacgaaacagacggctatgaagccatccaagttggttttgaagataaacgtgaagtcttgtcaaacaaacctgctaaaggtcatgtagcaaaagcaaatactactcctaagcgcttcattagagaattcagagatgtcgcattaggagattacgaagtaggaacagaaatcaaagttgatactttcgcagccggcgacgtcgttgacgttactggtgtaacgaaaggtcatggtttccaaggtaacattaaaaaagacggacaatcacgtgggcctatgggtcacggttctcgttaccaccgtcgtcctggttcaatgggtgctgttatcaaccgtgtcttcaagggtaaattattacctggacgcatgggtaacaaccaacgtactgttcaaaaccttgtggttgtaagtacagatgttgaaaagaacgttatccttgttaaaggtaacgtgccaggtgctaaaaactcaatgattacaatcaaaacagctgttaaagctcgtaacaaataatctgagaagggaggattttaccaatggcaaacgtaacattatttaaacaagatggtagccaaaatgggaacgttgaattaaacgactcaatctgggctatcgaacctaacgaaaacgttgtgtttgatgcaatcatcatgcaacgtgcttcattaagacaaggaacacacgctgttaagaacagatcagctgttcgtggtggtggtcgtaaaccttggcgtcaaaaaggtacaggtcgtgctcgtcaaggctcaatccgttcacctcaatggcgtggtggtggtaccgtatttggtcctacacctcgttcatacagctacaaattacctcgtaaagtacgtcgtcttgcaatcaagtcagtactttcacaaaaggttatcgacaatgatttagttgttgtagatgcattcaactttgacgcacctaagactaaagaattcgctgaagtacttaacaagttagacgttaatactaaagcattggtagtacttgaagacggaaatgattttgctgcattatcagctcgcaacttacctaatgtaactgttgtagctgctgatggtatcaacgtattagacgttgttggcaaccaaaaattaatccttactcaagctgctctttctaaaattgaggaggtgcttgcataatggaagcacgcgatgttattttacgcccagtagttactgaaaattcaatggctgcaatggacgacaagaaatacacatttgatgttgatgttcgtgccaacaaaacacaagtgcgttacgcaatcgaagaaatctttggtgtaaacgttaaaaacgtaaacatcatgaacgttcgtggcaagttaaaacgtcaaggtcgctatgctggctatactaaaaaacgccgtaaagcaatcgttactttaactgctgattcaaaagaaatcaagattttcgaagattaagcaacacttaaatagaataattataggagggtatacacgtgggaattattaagtacaaaccaaccacaaatggtcgtcgtaatatgaccagctcagattttgctgagatcacaaagacaacccctgaaaagacgttgttggaatcccaaagccatactgctggtcgtaatgcacatggtcatatcactgttcgtcatcgtggcggcggtcataagcaaaaataccgtgtcatcgacttcaaacgtatcaaagatggtatcaaagcgactgttaagtcaattgaatacgatccaaacagaacttcaaatattgcattaatccaatatccagatggtatcaaagcatacatcatcgcccctaaaggtcttgaagtaggcatggttgttgaatctggtgtggatgccgatattaaagtaggtaacgcattaccattagctaatattcctgatggtacacttatccacaatatcgaattaaaacctggtaaaggcggccaattggttcgttcagctggtacatcagctcaattattaggtaaagaaggcaaatacgctatcgttcgtttaacttctggcgaaacacgtatgatcctacttacatgtcgtgcaacgatcggtactgttggtaacggtcaacacgaattaatcaagattggtaaagctggccgtaaacgttggatgggtatccgtcctacagttcgtgggtcagtaatgaaccctaacgatcatcctcatggtggtggtgaaggtaaagctccaatcggtcgtccttctcctatgtctccatggggtaagaagacgcttggtaagaagactcgtagtagtaaggctcgttcagagaaacttattattcgtcatcgtaaatcaagataatcaattccaattgaacatgtctaaagccaatgcggcttaaacataagtcacattgaactttttattcgaaggaggtttcataatgagtcgtagtttgaaaaaaggaccattcgcagacgcacacttgctcaacaagattgaagcacaagccgatagcgaaaagaaacaagtcatcaagacttggtcccgtcgctcgacaattttccctagctttattggctacacaatcgctgtttatgacggacggaaacacgttcccgttttcatctcagacgatatggtaggccataaattaggtgaattcgtaccaacaagaactttccatggtcatggaaatgacgataagaaaacaaaagcacgctagaaaggaggatgaactcaatggcagatcaaattactagtgcaacagctagcgcaaaatcagttcggatggcagcccgtaaagtacggatggtagtcgacttgattagaggcaagagcgttgcagaagcaattgcaatcttagaatttacaccaagagctgcttcaccagtcgtaatcaaagttttgaaatcagctatcgctaatgcagaacataattacgacttagatgcagaaaacttggtcgttacagaagcttatgctaacgaaggaccaacattgaaacgttttcgtcctcgcgctaaaggctcagcatcaccaatcaacaaacgtacaagtcacatcactgtagttgtatcagaaaaagaagcataaggagggatatcgcgtgggtcaaaagattaatccaaccggttttcgtgttggcgtcatccgtgattgggacgctaaatggtatgcagaaaaagatttcgcaacattcttacacgaagatcttaagattcgtaaatatatcaacacaaaattagctgacgcatctgtctctactattgaaatcgaacgcgctgcaaatcgcgtgaacgtttcaatccatactgctaaacctggtatggtcatcggtaaaggcggttctgaagtagaaaatctacgtaaagaattaaacaacttaacaggtaagaaagtacacatcaacattgtggaaatcaagaaacctgatttagacgctcacttagtaggtgaaggcattgctcgtcaattggaagcacgtgttgctttccgtcgcgctcaacgccaagctatgcaacgtacaatgcgcgctggtgctaagggtattaaaactcaagttgccggccgtttgaacggtgctgacatgtctcgtgtcgaaacacatgctcaaggaactgttcctttgcatacgctacgtgcagacatcgattattcatgggacgaagccatgactacttacggtaaattaggagttaagacttggatttatcggggcgaagtattacccgctaaagccaacaacaatacgaaaggagggaaataaacatgttagtacctaaacgtgtaaaacatcgtcgtgaattccgtgggaagatgcgcggtgctgcaaaaggtggcaaagaagtcacttttggtgaattcgggctacaagctttagaatcaagttggattaccaaccgtcaaatcgaagctgctcgtgttgccatgactcgttacatgaaacgtggtgggaaagtgtggattaaaattttccctcacaaatcatacactgcaaaaggtgtcggcgttcgaatgggttcaggtaagggtgctcctgctggatgggttgctgtagtaaaacgtgaaaaagtcatgtttgaaatcggcggcgtttctgaagaagttgctcgtgaagcattacgcttggcatcacataaattgccagttaaaactaagatcgtaaaacgcgaggaagtaggtggcgagtcaaatgaaggctaaagatattattgaattaaccactgctgaaatgcttgaaaaagaacaccaatacaaagaagaattattcaatcttcgtttccaacaagctaccggtcaattagaaaataccgcccgcttaaagcaagttcgtcagaacattgcacggattaaaactgtattacgtcaacaagaacttaacaaataataaatggaaaggagctatttactttgagcgaagaaagtcgtaaccatcgtaaagtgtaccaaggccgtgttgtttcagacaaaatggataaaacaattactgtcgtggttgaaacttataaaacacatcctgaatatggtaaacgtgttagatattcaaagaaatattatgcacaagatgacaacaacgaagcaaaagttggcgacgttgtgcgtgttatggaaactcgtcctttgtcacgtacaaaacggttccgtttattagatgtcgttgaaaaagcagttattatctaaatcgttactcaatatatataagtgacggaaggaggacctataagtgattcaatcagaaagtcgtcttaaggttgctgataactccggtgcccgcgaaattttaactattaaagttttgggtggttcaggtcgcaagactgctaacatcggtgatgttatcgttgcaacaattaaacaggcaacaccaggtggcgttgtcaaaaaaggtgaagttgtcaaagctgttatcgttcgtactaagtcaggtgctcgtcgtgcagacggttcttacatcaagttcgacgaaaacgctgctgttatcatcaatgatgacaagactccaaaaggaacacgtatcttcgggccagttgcacgtgaattgcgtgacagtgatttcatgaagatcgtttccttagcgcctgaagttctataattacagacaaccaaggaggtgcgtatatcaatgttcgttaaaactggtgataaagttaaagtaatcagtggtaaagataaaggtaaagaaggtacaatcatcaaagctatgcctaaagaaggccgtgttgttgttgaaggtatcaataccattaaaaagcatgttaagccaaatgctcaaaaccctaatggtgggattgttgacacagaggcaagtatcgatgcttcaaacgttatgctaattgatccatcaaccaacgaagctactcgtgtaggtttcaaagtgattgatggtaagaaagtacgcgtttcaaagaaaactggagaatcaatcgataaataatcttttggggaaaggaggcactttttacatgactaaccgtttaaaagaaaaatatgttaaagaaatgacaccagcgttgatcgaaaagttcaactacacatcaagcatgcaagtacctaagatcgaaaagatcgtacttaacatgggtgttggtgatgctgtttcaaacgctaagaatttggataaagctgttgaagaattaggtttgattgctggtcaaaaaccattaatcacaaaagctaagaaatcaatcgctggtttccgtttacgtgaaggtatgccaatcggcgctaaagtaactttacgtggcgaaagaatgtacgatttcttagataaattagttaacgtatctttacctcgtgttcgtgattttcacggtgttagtgcaaaatcattcgatggtcgcggtaattatacattaggtgtacgcgaacaattgatcttccctgaaatcgattatgataaggtagatcgcgttcgtggtttggatgttgttattgtaacaacttcaaatactgacgaagaagcacgcgaattgttaacacaatttggcatgccatttgctaaataaaaagggaggtcaatttcttggctaaaaaatctttagttgtaaagaatcatcgtccagcaaaattttcaacacaagaatattcacgttgcgaacgttgtggacgtccacattctgtatatcgtaagtttaagctttgccgggtttgcctccgtgaattagctcataagggccaaattccaggcatgaaaaaagcaagctggtaattataaagagtcaataaggaggttaattccacatggtcatgacagatccaatcgcagactatctaacacgtattcgtaatgccaacatggtacatcacgaatcattagaagtccctgcttcacgtatgaaaaaagaaatttctgaaattttgaaacgcgaaggctttatccgcgattacgaagtgattgaagacgacaaacaaggtatcatccgtgtattcttgaaatatggtaagaataacgaacgtgttatctctggtttgaaacggatttcaaaacctggtttacgtaattacgttaaagctaatgatgttcctaaggtattaaacggcttaggcatcgcaattatctcaacaagcaacggtgtcgtaactgacaaagaagctcgtgaaaaggctgccggcggcgaagttctcgcatacgtttggtaatctaaacttaaaataaggaggtgtcataacgtgagtcgtatcggattaaaagtaatcgaagttcctgcaggtgttaccgttactaaagacggtgaaaacatcacagttaagggacctaaaggtgaactaacacgtcatttcagtccagtgattgaaatgcacgaagaaggtaaccttatcaactttacacgtaatagtgaaagtgatcgtgcaatgcacggtactatgcgtgctaacttaaacaacatgatcttgggcgtaacggaaggtttcaagaagacattggatcttatcggtgttggttaccgtgctcaattgaaaggcaagactttagtattgaacgttgggtattcacatccagttgaaatggaagccccagaaggtgttacagtcgaagtcccatcaaacacaaacatcatcatcagcggtattagcaaacaacaagttggccaattcgcagctgaaatccgtgatgttcgtcctccagaaccttacaaaggtaaaggtattcgttatactgatgaatatgttcgccgtaaagaaggtaaaactggtaaataaagcagcctgagctgttaaacgatattaagaggtgaaaattgtgattacaaaaccagacaagaataagacacgtcaaaaacgccatacacgcgttcgtggcaagatctctggtactgctgactgcccacgcttgaacgttttccgttctaacaaaaacatctacgctcaacttattgatgacgtagcgggtgtgacgctagcaagtgcctcaacattagataaagaagtaaaagcagaaggtactaaagtagaacaagcacaacaagttggcgcattagttgcacaacgcgctgttaaagccggccataaagttgttgtttttgatcgtggcggttacttataccacggtcgtatcgaagctttagctacagctgctcgtgaaaacggactagaattctaataaggaggaaaaccatttatgacttacattgatccaactcatttagatttagaagatcgcgttgtttcaatcaaccgtgttacaaaagttgttaaaggtggacgtcgtctacgtttcgcagcaatcgtaatcgttggtgataaagacggtcacgtaggtttcgggacaggtaaagcacaagaagttcctgaagctatccgtaaagccgttgaagacgctaaaaagaatcttatcaatgttcctaaggtcggaacaacattacctcatgaaattattggtcgcttcggcgctggtcgtgttctattaaaaccagctgttgaaggttctggtattgctgccggtggtgctgttcgtgccgtcatggaattagcaggaatcgatgatgtgacaagtaaaacattaggtagcaaaactgctatcaatgttatccgtgccacaattgacggtttaactcgtatgaagactgctgaagaaattgcagaattacgtaatgtatctgtagaaagcttacaaaactaggaggataactgaacatggctaaattaaagattactttaagaaaaagtgctgctcatcgtcttccagaacaacgtaaaatggtcaaagaatttggcttgaaccgagtaaatagttctgtaatcaaaccagatgatgctgcaactcgcggtgtgattttcaaactcgcacatttagtaacagtcgaagaaattaaagactaatttcaacatatattgcaaggaggtgcgcacaataatgaaattacatgaaatgaaacctaacgaaggtgctcgtgacgttcgtaaacgtgtcggccgtggtacttcttcaggtactggtaaaactgctggtcgtggtcaaaaaggccaaaaagctcgtagtaaagtacgtttaggatttgaaggtggacaaatgcctttattccgtcgtatgccaaaacgtggattcaagaatatcaaccgtaaggaatatgctgttgtcaacttaaacgatttaaatcgttttgaagacggtgcagaaattacttcaactgttttaatcgaagcaggcgttgttaagaatgaattatcaggtgttaaattattagcgaatggtgaattaaacaaaaaattgaacattaaggtaagcaagtattctgaagctgcaaaagctgctgtagaagctgctggcggttcaattgaggtgatttaattgctaaagacactcaaaaacgcatttaaagtaaaggaaatccgtagtaagattttgtttactttaggcgttttgatcgtttatcgtttaggtgcacaaattacggtaccaggtgtgaatgctggtgcattgactaagttgggttcaactggtttgatcccattgcttgataccgtaagtggtggtggcttggcgaactattccatcttctcgatgggggtttcaccattcatcactgcccaaattgtggttcaattactacaaatggatattgtgcctaagtttgttgaatggagcaagcaaggtgaagttgggcgacgtaagcttaaccaagtaacgcgttacttaaccatcatcttagcgtttatccaatcgatagggattaccgctggctttaactcactcagtcaaatgggcttggttaaagatccggggattaagaccttcgttagcatcgggatcattttaacgggtggtacgatgttaattacatggttgggtgaacagataacggataaaggcttagggaatggtgtgtcaatgatcatctttgcagggatcattgcacgccttccaagcggtctttaccaaatcttccgcgaacaagtcttgaacgcttcaaaaggcgatatgtggaaaggtgtcttattcatcatcggtttgattattgcagtactcgtgattgtcacatttgtgacatgggtccaacaagcaaatcgaaagattccgattcaatatacgcgtcgtgaagctggtgcaggtgaaaatagttacctaccccttaaagttaacgtcgctggtgtgattccggttatcttcgccagttcatttattatgacacctcaaacaatcttactggccttccaatcaggtcatggtgcagatacttggtttaaagtattatcagatatcttcagcatgcagactgtgacaggttcgattgtttatacggtgctcattgttctctttaccttcttctatgcttttgttcaggttaaccctgaaaaagttgcggagaacttgactaagcaagggagttatatcccaggtgtttggccaggtaaaggtaccgagaagtatctttctagcgtattaatgcgtctttcaactgtcggtgcgttgttccttggggtaattgcattattaccacaattagcagcaaacctcggtggcttaccccaatcaattggtttgggtgggacgagtttactaatcgttgttggtgttgcgcttgaaagcacacgtcaactcgaagggttacttatgaaacgcaagtatgttggattcattcgataagcaattatcgtttaaaaagtattgaatcctggttttaaataggaggcaaaggcatgaatctcatgttaatgggacttcccggcgctggtaagggaacgcaagctgaaaagattgttgacgcttatcatattccacacatttcaactggtgacatgttcagagctgctatggcagatcaaacagaacttggggttaaagctaagtcattcatcgataaaggtgaattggtaccagatgatgtgaccaacggaattgttgaggaacgtcttgcacaagcagatactaatgtaggttatctccttgatggttttcctcggactcttgatcaggcggatgctttagctgccattactgataaattgaacaaacctttagatggtgtgattaacattgatgttgatcctgaaatcttggctgatcgtttatctggccgctttatttgtaaaaattgtggtgcaacgtaccacaaactttaccatccaactaaagtggaaggtacatgtgatcgttgcggcgaacatgttttcttccaacgagaagacgacaaacctgaaacggttaagaatcgcttaaaggtcaatatcgaaatgaatacacctttacttgattattatgaaaaacgtaacctactttacacggtagatgggaatcaagaaattgatgatgtgttctctgccgttcaaaaagtacttgataccattaaagactagtcatcaactcaagtgatctcacggtcattgttcacgtaaaagcctgactagttgtttaatgacagaattctcagtgcttttaaaaatttaatacttgtgatataatatctcggtatgaccactagcggtgagtgcggagagctctcaccatttttctgtatgaattttcacaaccacaagggggtacttttgcgtggcaaaagatgacgtcattgaaattgaaggtaaagtaactgatactttaccaaatgcaatgtttaaagtagaacttgaaaatggtgcagttattctggcacacgtttctggtaaaatccgtaagaactacatcaagattttacctggagaccgtgtgacagttgaattgtcaccctatgatttgactaagggacgaattacgtatcgctttaaataggcgtaaggatcatatcaaggaggtcagtcgatatgaaagtaagaccatcagtaaaaccaatgtgcgaacattgtaaagttatcaaacgaaaaggccgcgttatgattatctgcgcagctaacccaaaacataaacaacgtcaaggttaatattaattaagcaggaggtgcaagaatggcacgtatcgcaggtgtggatttaccacgtgataaacaaattgtgattgctttaacttatattttcggtatcggaaatacaactgccgttaaagtcttggctgatgctggcgtcgcagaagacgtccgtactcgtgatttaacgccggatcaagaagacaagatccgtgcagcaatcgacaaagttaaagttgaaggcgatcttcgtcgggaagttagcttaaacatcaaacgtctacaagaaatcggttcttatcgtggcatgcgtcatcgtcgtggattaccagttcgtggtcaaaacacgaagaacaacgcacgtactcgtaaaggtaagaaagttacgattgcaggcaagaagaaataatcagtaaaaggaggttataatttatggcaaacaagaaaaatgctccacgtaagcgtcgtgtgaagaaaaatatcgaagccggcgttgcacatattcactcaacatttaacaatactcttgtgatgatcactgatcctcatgggaatgctgttgcatggtcatctgctggttcattaggtttcaaaggtagtcgtaagtcaacaccttttgctgctcaaatggctgcagaagctgctggtaaagaagccatggaacatggtatgaaatctgttgaagttgctgttaaaggaccaggttctggccgtgaagctgcaattcgctcattacaagcaactggtttagaagttactgctattcgtgacgttacaccagttcctcataatggatctcgtcctccaaaacgccgtcgtgtttagtctgggctacgcttcattttgagacaaactgaaacgtgttcacgtataaacacttctcgttttgaaaggggtaaaagataagaatgatcgaatttgaaaaaccaaacattacaaaggttgatgaaagtactaactacggtaagttcgttgtagaaccacttgaacgtggctatggtacgactttaggtaactctttacgtcgtattttactcgcttctttaccaggtactgctgtcacagatattcaaattgatggtgttttacatgaattttcaacaattgatggcgtcctagaagacgtaacacaaatcatcttgaatattaaaaaattagcacttaaattgcatgttgaagaagacaagacaattgaaatcgatgttaagggtccggcaacagttactgctgctgatatcatttctgatgatgacgttgaagtcttaaatactgatcaatatatttgtacagtagctgaaggcggcaatttccacgtgcgaatgacagttaaaaaaggccgtggttatgttgctgctgatcaaaacaagtcagacgatatgccaattggtgttttgccaatcgactcaatttataccccaatcagtcgtgtcaactatcaagtagaaagtacacgtgttggtcgtcgtaacgatttcgacaagttaacacttgatgtttggacaaacggttccatcagtcctagagaagctattagcttagctgcgaagattatgacagagcatttggcaatctttgtagatcttactgatgaagcgaaaaatgctgaaatcatggtcgaaaaagaagagacacataaagagaaaatgcttgaaatgacaattgaagagttagatttatcagttcgttcatacaactgtttgaaacgcgctggaatcaacactgttcaagagttaactgacaaatcagaagcagatatgatgaaagttagaaatcttggtcgcaagtcgttagaagaagttaagaacaagttatttgatcttggcttaggcttacgcacagaagaataaactgataagaaggagggactccattcatgagttatcgtaaattaggtcgcacaagctcacaacgtaaggcaatgttacgtgatttgacaactgatttaatcatcaatgaacgtatcattactacagaagctcgtgccaaagaaattcgtaaaacaactgaaaaaatgatcactttaggtaaacgcggtgatttacacgctcgtcgtcaagctgcagcattcgttcgtaacgaagtagctgatattcgcgaagaagacgatgctgtaatcgttcaatctgctttacaaaaattatttagtgacattgctccacgttatgctgaaagaaatggtggttacacacgtattcttaaaacagcccctcgtcgtggtgacggtgcattaatggtgattattgaacttgtttaatcacaaaatgatttaggtcatttgatcgatgagacagggcgttatgatgatggaagtactccgagtctagtcctaaggtcatactagcaacacagtatggctttcatcgattgatgatttacataaaataacgtctaattccgagttaaatcggagttagacgttttttgtgttggatatcctttgaataaagggtgactaacgaaagcgctatggccttttatatgataaaatagggacaggtttttgatttgaaacgtgcatggataacataaccaatgcactttaattccaaggaaaatacgggttattaatcatgaatgagcaaaaaataattcaagttgaacatttaaaatatgaatacccacaatctgaaggacatttagcactgaatgatctttctgtcagtatcaatgccggcgaatgggtcgccattatcggtcataacggtagtggtaagagtaccttcgcgaaatcattgaacggtttgttagatttacaatcgggatcagtgacgattgatgggttaccattgtcgttggataacgtgtggactattcgccagaaaattggcatggtttttcagaatccggataatcaatttgtcggtgcaacggttgaagacgatgttgcttttggtctcgaaaatcaggggattccgcgagctgaaatgattgaacgggttaaagacgcggttgaacgtgttggtatgagtgaatacttgaaacgtgaaccaagccgtttgtcgggtggccaaaaacaacgagtggccttagcagggatcatcgcacaacaacctgagattctgattctcgatgaggccaccagtatgctagatccaaaagggcgcgaagaagttctcgcaaccatttataagttaaaacaagaaacaaacatgaccgtgctatcaattacccacgatattgacgaagccgcaagtgcggaccggatcattatcttagataaggggcaagtgcatgatcagggcacaccggccgatatttttgcatatgggcaacgtttgcttgatttagggctagatgttccatatccagaaaaacttaaagcagcgctaaatgaacgcgctatcgagatgcccacagattatctcacaacggaaaggatggttgagtacttatggacattacattcaaaaatgtaagctacacttatcagccaggcacgccttttcaagggattgggctagaaaatatcaatgtgaccattccaagtggctcctatacggctttgattggtcatacaggtagtggcaagtcgacattgctccaacacctcaatgcactcttaaaaccaacgagcggcgttgttcagattggtgagcgcgaaatcacgcctgagaccaacaacaaaaacttaaaggctgttcgtcaaaaagttgggatggtttttcaatttcctgaaagccaattatttgagtcgacggtgcaaaaagatattgcttttggtccgcagaacttcggtgtccctgaagctgaagcacttgaacgcgctaaagagatgattgaactcgtcggtttacccgctaacgtgattgacaagtcaccttttgatttatctggtgggcaaatgcgccgcgttgccattgctggtgtgttggcaatgaaaccggaagtattggtcttagatgaaccaaccgcggggctcgatccagttggccggcgtgagatgatgacgctttttgaaaagttacacagtgagcaggggatgacgattgtgatggtcacccatcagatggatgatgtggcgaactacgccgacaacgttatcgttttggaacatggcaagctagctaagaccggagcaccacgcgaaatttttgcggatccggattggttaacggaaaaacaacttggcttaccaacaacgactcagttcgcgcaagctttaatgcgacaaggctttgtctttgatcaagtaccactaaccgaacatgaattggccgccttattagcggaacaactaccgaagaaggcggggattggacatgaataaattaattctgggccgatatatccccggtgattcagtgttacaccggatggatccacgggcgaagttattagccagtttttattatattgggatcatctttttagcgcgtacatggcaagcctatgctttattactggtctttacgttagcgctaatcgggatttcaaaaattaaactcgacttctttattaaaggagttaagccgctgttatggctaattctatttacagtgctcttacagattttcttcacccgtggtggtcatgtctattggcagtggggatttctgacgcttacccagtacgggctgattaatggcgtctacatcttcatgcgctttgtattgattattttcatgtcgactctcctgacattgacgacgccgccattgtcgttagcggatgcgattgaatcaattctcaagccgcttaaagtagtccattttccagtgtatgaagttgcattgatgctatcaattgcattgcgctttgtaccaacattgatggatgaaaccactaagattatggatgcgcaacgtgcgcgtggggttgattttggtgaagggaatttattccaacaaatgaaagcaatcgtgccgattttaattccgttatttgtcagcagttttaaccgcgcggatgatttagcaacggcaatggaagcacgggggtaccaaggtggcgaaggccgcagtaagtaccgaattttgaaatggcggacaagagacaccgtggcatttatcacgatgggccttttaaccgtcgcacttttattcttaagataacgcaaaaaggactcagttaaaccaacggaggttgatttagctgagtccttttttttttgcacttttttgattagcttgtttttttgaaccgacgtttcaacgttgaagcactaatgccagtttggtaactaatttgagcgtacgtaaagccctcttcacgcatgtctagggctgcttgtatgttcatcatcagtataggtcgttttacgaccttcagtgtaactagggttggtgacacgagcattatggttcccttcctgggtacgagtgagaatcatatcgcgctcaaattgcgcaaaagcactaaataaggtaaaaatgagtcgtccggaaggggtgtcttcaatgatgcccatgttcaaaatatgaattttaatgcgggctttaaaaagttcttggatgatttcaagtgcttctttggtatttcttgcgaagcgatcaagttttgtaacaacgatggtatcaccacttgaaacccgatctaatagttcattaaatttagggcgatcaacggtagttccggtaaacttttcgctgtagataatgtcacagctttcttcctttaattgactaatctgggttgctagactttgtccggcagatgaaacgcgtgcgtatccgaacttcattgcacaattctccttatttctacttataataataattatacagcatttgaacttgttttatattaaaaatgcatttttaaatcaaattttttacgaacattcataaaaagattgctacttttcagaaaattatttagaatagaactactaactttttaacacaagagggataaaatgacacaacggtatcgcgtaacaattgcctatgatggaacggattttgcgggtttccaagtgcaaccgaaccaacgaacagtacagggcacattagaaaaagcactgacaaagatgagtaagggtgcttatattcaagtgtatggttcagggcggacggacgcaggtgtccatgcaacggggcaggtggtccatttcgactatccaggtcaattacccgctattagtatgttacgggccttaaatagcctcttaccgcttgatatggaggttgtggatagtcagttagcgggcgatgactttcatgcacgattttcaacggtcggtaaacggtatatgtatcgggtcgatcttgggcattatacgaatccattcaagcgacgttataccggtcattatccgtatccaatcgatgtggaacggattcaagcggcgctgccagatgtgatgggcacgcatgattatacgagttttgcggcttcaggtggggtcattaaggataaggtgcggacgatttatgatgcgaccgttgttttcaatgaacccgaaaatgaactcgtttttgagttttatgggaacggctttttgtataacatggtgcggatcttggtcggaactttattagaaattggtaacggtcggcgggatgtccacgattttttacggctgtatgaagttaaggaccgtcaacaagctcgctcaaccgcgccagcaagcggtttgtaccttaaaaaagtttattacgaaactgatgaaaataattgagattcaattgacttaatcgtgaaattacgatactatagtatctggtattgtttgccccacgataggccccggaaacttattgagtgtcaaacaaacacagaatattggaggaataaatcgtgcgtacaacttacatggctaaaccaggcgaagtagaacgtaaatggtatgtgatcgatgcaactgatattgcattaggtcgtctatcaactgtagtcgcttctatcttacgcggtaaaaataaaccaacatttacacctaacgttgatacaggtgataacatcatcgtcatcaacgctgaaaaaattaaattaacaggtcgcaaagcaaccgacaagttatatcatcaccatagtaaccatcctggtggtttgaaaactcggactgctggcgaaattcgtgaaaacaacccagaacgtttaattgaaatgtcagttaaagggatgttacctaagaactcattgggtcacaaccaattcttgaagttacacgtatacgctggtggcgaacacaaacatcaagcacaaaatccagaagtcttagacattacggacattatttaaggaggaaactatagtggctcaagtaacttataacggtacaggccgtcgtaaaaactcagtagctcgtgtacgtttagtaccaggtactggtaaaatcactatcaacaacaaagacgttgttgattacattccatttgctaacttgattttagatatgaaacaacctttaacaattactgaaacaacagatagctatgatatcttggtaaacgttaatggtggtggattctcaggccaagctggtgcaatccgtcacggtatttcacgtgccctattgacagttgaccctgacttccgtccagctcttaagagcgctggcatgttaacacgtgaccctcgtatgaaggaacgtaagaaaccaggtctgaagaaggcgcgtaaggcatctcaatttagcaaacgttaatatcgttatgctaccgagatggaaacgttggtacgacaacgtttcaaacgtatctcgtttaggaaagtggttctcccaattagggcgagccactttttttgtccctcgtttttgtgcgcgttttgtgcgcgtgtctctgtcgagggtcatttgcatcgcgaccttttagggcgtcagctcaagccttacgttgctttgtgcgtcaattttaacgagtttcgttgagtttcatttcctgcgcgagtgaattcttgcgcgcctctgcgatccgttcagcgaacttattatgcacatccagaccgaccacatcaggggtgtttacgtaaatccgcgtggtcttaatatcggagtgcgtcagcgcttcggagatcagttcgaggctggcaccaccttggcgagctagagtggagaacgtgtgccgcagcttgtgtggcgtcacgcgcaccagctcctctgcatggcgcttgtagattgaattcagtcgatagttcaagtagtccgcatggagcggttgattgatacctcctctaaagttggtgtaggtgaataggaactgatctgggccagcttggatattcacgtcagcaagctccttggcttgttgttccttccactctttcaaaagtggaatcagaaacgccgggatctggtgtgaagtttccttgttggctttggttggcccgattttgccgctctttttgagggcttgaataatcaggacgtaaccggtgttgaagtcaatgtgtttccattgcaacccgtatgattcgcctttgcgatcaccaaggttcaacgtcatcagcaacagcaagtagtcttggaaggacagcttccggttctcgaagtcttctttggcagcatcgagccaagcaatcatttcatcagcagatagagacgagccggtcattttacgccgagtggcgagccgctccttcttcgggctgccgaccaatcgtagggctttttcgatacggttggcgtcgatgtagtccatgatctcggcgacctcgaagacttggcgaacgtaagccttgaccgtgcgaatgttcgcgtacttctcagccaagattgaaagttcttgaaccacgaactgcttgttcaggttcaagtagttcagtgaataatcaccgaacagcggtagcaagtgcaaccggaaaatgttttgggtgttgacctgggtttcctcggaaggaacgacccggatgcgcccactaccaccggcagtgtacagtggccaccaaacttcccggtagaaatccttgaacaggatctcgccgttagtttgaatggaacccgccgacgccttgcgctgtgcttctttgatcttgtcttcgactttcttctgcaatgccttcgcttccagcttggttgcgacggttttgcggtaacgcagcgtctttacgccgatgatgtcgcgaatgtctttggggtagaacacctccacaaaataagtgcctgcatcagttttagtaattgccatgatatttacctcctgttggttgtcaacgagcttgaacaggacgtaaagctacatcgacatattaccatccttcaacacgtttgcgaagccatgcatcgacggcatcgcgatcataacgaaccacaccgcagacgttgattcgtggtaggccaaggccaatccacttatctaaggtgttgttagaaatttttaagtagtcgcacagttccatcttcaacagataccgattgttggtggcgagttcgttacgcgctttgttgacctcatcgagaaacaaggtggctagcgcgttgcgaatcgcgatcacgttgcggtcatccattggaaaatcgagtgtggactgggatgctggtgcttcgataaaacatgcctcctttccggcagtcacgaacagactgatgcgaatacgacaggcggtcatcattcagcccggttccaaccggctattgagaacctcgctgtgagacgctctttctcccgtttcgtggcagtgacgtacaagtatccggcctactggggtaatcgctcgctcgtgtgaggttgtggcgttgtgaggcctgcgttgctaaatgatggtattcagttgtcaaaggacatcggcggtaatcaaaaacccgcttcgttatatacagacaacgaaagcgggtcgaaatgaaagggattggtgaaaattgtttatgtttttttctgaccgggattttgtgagggtagcgcaaggtgctgctcaacgttgaagcacttcgcaatgtagatcagtttgatttgaagctcttgtcttaaatctggatcgacgtgccgttgcccgtacttggcctcgtagtcaatatcacggccaaataattcaagcatgagggaaacagcgtcgtcgttgtcctcctgaaccgccaaaataaccggtactaggttatcgatctctgaataatgcattgaatactcctccgcatccattacatgtttgtgtatgctgcccgaattcgattcaaagcccgttgccggcgataattcaccccctggccagttttgccggaacggctaccgatttccacgtcgttcagctcgtcataatagtattgatacaacaccatcttatcaggtagagaaagggaagcaaccgccgtggcaagacgctcgttttcgatgaagtcctccaagtgttcgatttcctcatcggtcagtttgagttcgtcaagatggtgtggatcttcaatttcttcgatgagccattcttcgagtggtgtctctttgattcggcgaagattgactttgtggcgattgattcgttcgttcttgagcgcttgctgcacatagcggataaacatccgcgacacttcttgttcactactcatttgaatggcctcctaaaatcaactaatgtggttacatatagacagacaactttcggcacatgaaatgaaaggggattcaggaatttgttaaataatttcacttgtacttagtggctgttgaactaggccgccatatcttcgacccttgtagtaaatttatagcgaatttgataggcctcaccctcgaatttagccaaaattaaaattggtatagcaaatacccttaacagggtcagcacattgctcaagacgatggccgcgtcaatcttgacggccagtgattcagctgtccgagtgttcaccaagtcaagccccagcgtgcccttcataaaagcaaaccggcgttcaatggtacctcttcgattctcggcatcagtatcctcacgccgtttcgctgcatcaacgtgttttggatgccggccaagcttcggaccgcagattcggatacccaaatccttacacagctttaggttctcccgattacggtacagcgtatcggccagtacttcatccggataatgtccatgaaggtcgtaatagtggtctaaagtttccgcgaagtcttggccctcagagaatgcggtgaaatcaaaacgttcaatgtcgactacgccttcacttaacgaacagtcaatcttcgccccaaattcaactttagcattggccttaccacgttgaattgggcgaatgtacggctgttggagactaacaattcggtcttcaacgtggtgagtcttgtgggtatacatgtaccattgctggtcaaatagaattcgaatcacgcctaagcgaatcgcttgttcatctggtagagtcgcaccctgatcgatgaattcgttgatgtaccgcaaatcacggcgcacatattgaagttgggccttgacctgtttatgaaagccaccacgctgttgctttggatgtcgtgaaaatgaggtccaacaatgcttcgcctcgcgtttgtacatgcgtgggtttggcacaccaagttggtgtgccatatcgatcgccatcgcctcaagattcagccttgcttggttgaggaggacggtgtcttgaggatacttgattttgactggcactgcggttgcgtccgtgatgacggtgtccactttgaatgggaccaacgcttcgatcttggcgcgtactgtatcattcatgatattcgtaatcagctcggagatatcggcaattcgtttgcgaaagtgtgccaggctggaataattgaacggctcaaccgctttgtattcggacaacccgatgaaatattgaagtgcgggtgtatcacgaattgccgcaaccaccccacgatcagttaaacccatccgttgttggatcaggattgccccatagagtaaacgaaatggttttgccgcacgtcccgcatttttggtgaactccaattggtatgcctcatcgagagctttccagggcatgacctccgccaactggacccactcattgttagagctaagtggggtacttaaaccggcaccaaaggattcaaatgacaattgaagtgggctgtgacgatagaccatacgataacctccgagtaggttcccaaaaaatgcaaggaaaatgcaggaaaacagctaattccaatggatttattataccgcaataatgcatatattagcttaactgcctgaattatagaatttttaagcagccactatgtagtggacactgaatatttgtaagtgccttgttttaatgggaaccgttccgttactgtcgtataatgaatgcagaggaatttcctgtttttggcagtttcccttgcacttgtcatctcgtaacggaggatttatccatggtttatcggcatactgacgttcaactatctttcgaatcgtttgatcctggattattcacctcggtatttgggacatgaaatcgcatctggccggtctgaaagcaacgtttggagcgttgcgaatactgactgagcggagaagttggtgatcgatgcaccacgaacagaccgacccagttttcggctcgacgcacgacctattcagttattcagttcaggtcgccaactgatggacttcgtccatgagccgactaaaccagttcttgtaaacatagttagaagcaagatgaatcaccacacgacgggcgtgccaagtaatcctaccggcgatgtgaaagagactgaaccgtagcgaggagatggttgaacgacggtcttccgagacaaagagctgtttaaagagctgaaccaggttataggcaataccggtgatcaaggctcgtgcagtgttccgtgcaaaagttgagctgtctgttttgtcaaagccaaacccgcatttcagctccttaatttggttctcagcattgccccgctgtctataggtcttgaacaaagtctctggagcctcggaggccaggctggtcactacgaatgcgtggttccagggaactagctcatctgccgtatgagtagaacatacgataacacggcgagctttaccccatgacgcggcctgatacttgaattcgtggtagacgcatttgctctcttcatattttggagggcaatccactaaggccgtttctgccagcttcccaagctttgaatttgccttgagtcgaaccaaaaagtcgacgccatgtgtgtcgcacatctcgtaaaattttggcgcagcaaaccccgaatcgcctcgaatgatgacgctggtgctttgagggagcgccgataggcgcgaaaaagttgtctcgacgaacttatcggcttccttgccggtgtactcattgccagggcgcatcaaggcgtctaagagcaacccggactcttgatcaaatacaacctgagggtgatatccataggccatatagtgagcgttgaaggcggaccgttcttgattaccgaaagtatcacaatgcgttgagtctatatccagcacgaagcgggattgaccactaagacggaaagccaaggcggctacttgccagataagcttccgaaagtcatctaggtcggcgtcttcaaggcgcttgaaaaaccgtgaaagtgagggctgtgagactagccgagagctacccaaggtggccgccagtacgggatcacgttgccagtcattggcactactgtcatgtaaatacccggcaacgtcgagcaacaatttttccaagaagatgtcgatcatcgaggccttccagaatcgtcgttggtctggtaacttgaggcactgattggcaagttgcctaaagttgatacgatgaagaaactcttggaacaaaacgagcccggcgtcatttgaaagttgaccgccgtcggcggtcagagtcacattggtattgcattgcagggataagctggttaaagttgagatggtgtgaagcctcgctttcgtgatggttttcgttgactcaaccttagcatataggcgcacccaatgggtgaaacaccaaagcagcgcagtcccgtgtgaatcgtgggattgcgctgcttttttgaaattctatgaataatccaggcttttttatttgttttataatccagtccaaccgattaattcatttaatgaatctttattacagaattgtttcattgcttagaaagcgattttattaagttgaggttgaaaatatctgtgttatactgaaaactaagtgtttttatgaaatcttattactttgtaattaacgatagtatgcatccctcttattctatctttgtataaggaatggggagatggtggctacgtgtttgcagaacgtgagactctggaattctatgcgttatagttaccattttgtcagaaattccactcaatcatggctcctatgatggaattacggacaaactgttcgatataatacatcataaaggagctttttattatggcaattaaatattcaaatgaatttaaagaatcgattgttagcttaagtcagactggccgttcggccaactcactggctaaagaatacaacgtcagtgtttcaacggtcactaagtggattaaacaagctgatcctaacaacactaaagtgctatcatcaaatgaacgtgctctgattaaagaaaataaacggttaaaagaagaacttgatattttaaaacgagcggcggtgctcatggcaaaaagctaattattaaagggcgtgccctcgtgttagaagtcgtcaacgctaatttacttgctgggcaccgcattacgcgtatcttatcagtactcaaaattccgcgctcaacctactatgattatctacattggcagccaagtagaactgaacgccgccggcatttaattaaacaagaagtgttaacggcttggttaagatatccaatgtatggctacccacgattaacgatcttactaaatcaacagtctgatattcacgttagtcagcgtctggtctatcaacaaatgtgtgaattagggattagatctagaatggttaaacgaatcaataagccaaccactcagactgattatgatcagcgaccaaacttgattaagcagttaactgatcaatctggtattttattgactgatattacgtacattccccttaaccatacttggtgttacctagctagtgtctataatccagtaacccgacgggttattgcttaccaacttaatacgcagatgactaaagaactagcgaccaacgttattgcccaagttatggcgcaagcagttaaaccacaaattattcatagtgatatgggaagccaatacacaagtgacttatttgaaaacactttatcgaagtatggtatcaagcattcttactcccgaaagggtcagcccggcgataacgcgcgaattgaaagttttcattcaattttgaaacgtgaatacgttaatttccaagattttaagacaattcatgaagcaatcgccggaattgataactatattcgttggtataacagtgatcgtatttcacttgtagcgtagctacaggctattaaattcaataatgttggggcttatttaatatactctaaagcgtttttaaaatctgaacgggactaaaacttcggcctccgaaaattaaattaagtaatttaaattgaaagtcaaatttgttcgtacttttatgtccggattcttgacataggagcccatctcaaatatactaatcaagctatgttgagattcagaatgctcagtacatgtgttagtttggtttcaaatcatcaacttaattaactatatatgactcaattggaggattgattaatcgtgaaaatctgtttttgtgcttcttccggtggacatctcacagagttgatgtgtttgaaaaaaatcatggatacgacgaatcactttattgtcacagaaaaaagcgatgaccttgaccaaaacctgacagatacaacgtattatgtcaagcagataaaccggaatgaaaaatttttcttcatccatttcatgaagctgatctttaacgaatttaagattttcagaaaagaacaacctcaaatggtaatatcaacaggtgccttggcaaccgttccaatatgcatcatggcaaaattgtttaggaaaaaggtaatctatattgaatcttttgcacgtacagagcggccgtcgttaactggaagaatactatatcattttgcggatgtatttttagtacaatgggaatcattattaaaatactatccgaaagcaaagtttattggcgcaattttttagtgaggtttttttatgatctttgtgattttggggacacaaaagtttcagttcaacaggttactcaaagagcttgacgtgttagtagaaaacggatcgttacgtgaagaagtttttgcacaaattggtcattctgattacgaaccacaacattatcagtttaagcgctttgtgaatcaggaagaatttgaacagttgattgattgttctagtgttgtaattacgcacagcggtgtaggtagtataattacagcaaagaaaaaaaataagcctgttttagtggttccgagattgagtaaatttggtgaacacgttgatgaccatcagctagaaatagctcaggcattttcaagcaataatcaggttgtgatgtgtactgaaatctctgggttgtcccaggcaatacaaaccgtgatgaatgtagagttagatccatatgtatcacatcaaagtactgcgattgaatttatcaatcagtatttaagaaaattggagatggaggctaacttatgattccaaggaaaattcattattgttggtttggttcacaagaaaaaagtcaaaatgtaaaagaatgcatggccacttggccattaaagactgattaccttatcaaagaatggaacgaaacaaattgtgatttttctgcaaacaaatttgtaaggcaggctgtagaacaaaaaaagtgggcattcgttagcgactactttcggttagtagcgttatacaatgaggggggtatctaccttgatacagacgttgaattaacgagaaactttgatactcttttaacggaaaaattttttgtgggctatatttttgattccagtattggtacggccgtcatgggttcagtcaagcatcatcgaattcttggagatttgattgacttatacgaagaagcatactgggatgatgattataaaaacttttatgtaaaaagattcggaaacatcaatttcacatgcaataacgatttactcacctattatcttaagacagagtattctgattttaaattgaatggcaaaacccaacacctcaatgattttagtgtatattccaaagaagaattcgaaattggaccaatcataggaaagaagcatgctttgcatcggtgcgagggcagttggaaggatgataaagactcacgcaaaaaaattatttcgtcttcaattaaacgtatggctgcaaggatcccattgataaatgttgaatcgtgtattcgacatacaacgtatgcaaaaaaaatgaagaatgaaaggttttatgatttatatttacgtgatactgaaaacaaataatattaattaaagaggataagagagtggatattgatgttgtgattctttgggtggatggaaacgatcccaaatgggttgctgaaaaagcaaaatatcagagtgataaggataaagtcaataattcgaccaatcgatttcgtgattgggatctaatgagatactggtttcgtgcgattgaaaactttgcaccatgggtcagaaaaattcattttgtaacatatggacatctgccgaacttcttaaatttggatgcgccaaagctacacgtagtaagacatgaagattttattcctgaagattgtctgccactgttcaattcctgcgccattgaagttaatatgaatcaaatcccgaatctagcagaacatttcatttacttcaatgatgacatgtttttattgaactcagtcgaccaagaggatttctttgatgcacagggacttccaaagttggaaggattgcaagggacgattgcgtcggtgggggaccaaagtgcttactgtcatcaaatgttgaatgacatagatatcatcaaccggaattttgacaagtatacacaaatgaagaaaaattttggaaaatggtttaatcctcattacggcgctcagaacgttcgaaatctttttttacttccttggaaggagtttacaggtttcaaaaatgcacacctcccagttgcaatgcttaagtcaacgctggatgaagtatggagtaaagagtttaaaccgctagatgcaactcggcatcatcgattcagaagttattatgacgttaaccagtacattttcagatactggcaaattgcaactggcaagtttagtcctcatgctgctatgggacttagatacgaggttgaagacgataatattgtagaaatcactgaaggcattactaagcagaaacagaagatgatttgcttaaatgatcctgaggaatcggttgattttgagaatcgaaaacgtgatctaatatcggcatttgatcagattcttccgaacccttcagtatatgagaggtgataagtgtgaatcctgaagtcagcatcattgttcccgtttacaatgcacaaaactacctacaaaaaaccatcgaaagtatcctgtcacagacgttcaagaatattgaagtaattcttatcgacgatggatctacagataatagcgcagaaatttgcaagagagctcaactcgaagacaatagagttaaatgggtttctcagaaaaattctggaattagtcaagctcgaaatactggcatcaaattagccgaaggaaaatggattgcattttgtgacaatgatgatttattaaaaaaagatctgattgcagacaatcttaaattggcgaagtcaaaagatgtagatatcgttaaatttggaagaaggtttatttccgaaaagacctccgttgatactaagtttacaacctcgcaacctatcgtgattacgcgagataatcttttcgaaaatttcgtagcgttgagtgatgggcccatctttttgtatgtgtgggatggactttttcggaaagatttcttggagaaaaatcatgttcacttcagcacggaaatgaaggccggagaagaagaccgtaatttcatgtttgactgtcttgaagcgtcaccgaatatcaaaatttgtgtcaatccaagtgtgtattattttcattattctagacctggaaatagtacatcacgaaagtttaattacaatagatgtgtatcggttgagttatcactgagtcatgaaaaaaagatgcttgaaaatttttttggtcaagaggcaagccaattaatagatcaaagaaaactaccctatctaaaagtttatatcgataacattctgatgggaacaggaacggatcttaaatttggagagcagaagaagctcctcagcaagttcattgttaataatgatatttttaggggacgggttgttactcaatcatggaaggacgtgctaattgttgccttttgtcgtgtttcactttttggaccattactcagaataatgtatattcgacatcaatcatgaaaggattaggattcgccaagttatgatgagcaaactcaggttgaaaaatccagtcacaatactgggaatattattttttgttgtgttgctgaactttatccgtggtaaccaaggacggattacatacacaattttcataggtttcttagttgtgtttattctgaataattcaaatgcactacgtagatcaaatttaacgctattactgacaatattcggagtgtatattttcgagcttgtggctgtatacttgggtacacattaccaggatgccctatccttatttcttcgagtcacgtttcaatttgcgtgcgtttttgcaggcattattttgttccattgtcgagatacactagttaagtttattaagacaatgactatatttattgcaggcgtgtgcggcttgtatggaatttatgaagccattatcaaattcaatagaattgcatataactattgcgtcagtaatgggcttgcaaatcgttattattggcaattcagcccaagtaattatagaattgcaacgttttatatccatcctattatttattctgttttagttgcggtttcgatcatactaatgtttggcttttttcaacatactaagacaaatatgtttctgatggtactgttgatgatcaatctccttctaacaaagtcacgttcagcttggattgcattagccatagtcttactattttggggaggttggtacctgttcaaaattcggcaagtaaattcgaagacattgtttgtcatactcatatgtttattaagcctaccttttattgtgcttgttctatcaaagactggggtttttgatacaatttttctccggttcaataatctttcatctgattcgtctgcgttacagcggactgggaccattacatattttcttcatcaggttattccatctacttcatttggctcactattgatcggccacggactggatgcagcctcggtattgatggactctgttagcataacaatgagtgattttagtgaaacggataatcaatttcttaccactttttatgatcaagggataatcgtgttattggttgtttgcttgatgatcttgatttcatttctgatgatttttcgtactaaagatgttcaggttcaaagtattgctgctgcatttgtaacaatgagcatttctatgttcttctttgaactctttaggttttttccaacagcatttatttactttatattcttgggattcatctgtgaagcatggacgagtcagcatattttgacgcgagagaggacgcaaaatgaacaaattagttagaatagccgaaaaaaagttcaataagtatgacaatattgattttgattacttgaatttaattaagtttaagaaatcgaatgagtcttctgacacaccaagactgaatttactactccctaaattgcaccaccgctacgtctttggcggtattagcacggcacttaaacttttcaatacccttgcaaacacgttacatatggagacaagaattataattactgacattcctgtggataaagatctgatacgagaatatccaaattataagttcattaaggctgaggaggatgtcatcgattcgagcaccacagtatgtgctgctgatcctgcttggcgtgctcataatatgttaccaattcgggctaatgatattttcttggccacgtcttggcgaaccaagtacgtaatagaaaatttgactaaaagccaagaagattttttttcaaagtctcaaaaaactttctatttgattcaagactatgagccaggattttttaattggtcatcagagagtatgctagttgattcgacttataaagctaaagatactgtggcgatattcaactcatctcaactttacaaatattttgaattgaacggttacgatttcgattccaaagtctattttgaaccagtgttaaattctgtaatgaaagatactatgcaacagcaagcgctaaaacatcaagaaccgaaagtgaataacgttctcatgtatgggcgtccgtttgaagacagaaattgttttgcactcgctgtgaattccctaaacacatatatcacgagatatcgtccagatcgatcttggaattttatttcaatcgggtcaaaacatcgagatattgagttggctgatggcttcaaattaacttcattgggaaagctaacattagaagattacgctcaattattagtgactagtcgtgtgggtctgtcattgatgagttctcctcaccctagttatccgccattagaaatggctactgctggcgttcaaaccgtaacaaattccttcatctgcaaagacttaagcacattcagctcaaacattatttccgtcaatcgtgccacttttgatgatttggctatgggaattaacaccgcagttaaacgtagtcaaacgatgaaattcgaaattgagaccaataccgattattacaagggcaatagccaattctcggaggttattaactttgtaagggaactcattaattaatacagttggagtgcatatcaatgagaattattgctaaaatagtccgacatttacgttcaaaattgttgcatttgctttcagaagatgaattaaaaaaagttgtgcggattgggaagcaagctagagttacagagagcctaagtataagaggcggggagtatatttctattggtgatcagttttatggaggaccagggtgtcgaatagaggcgtgggactcgttcaaagattttcagtatacgcctcagatatccattggagaccgagttaaaattaactcacgctgtcacatcggtgcaattaatagcatagtggccgtttaaaaactataacgttcaagcatttcaacccataagctcattattgcgttataataaatccatagaaaattaccgatttcgcacatttctcgtgcatttttccagaatatccttggaggttatctcatggcatatcgtcacagcccgcttcaactatcatttgaatcttttggcgctggtctaagcacacctcttagcccagataacgaatgggttcaattggcggaggttatgccatggaaggcgctcgatgacgcataccaattggagtttaccaagaatcttggccgcgctgcgaagccttttcgcatgctttatggtgctggtttgattcaacaacgaatggggctaacagatcgtggtgtagttgcggcgattcgggatacaccggcgcttcaatacttcattggtttgtctgagtacaaagcagtggcgccattcagctactccagcttggctcactttcgcaagcggattgccgacatttctgagctgattaccaatatcgtcaacgacactgtccgggctaagattgaagcgttggtcccgttcaaggtagacacagtcatcactgatgcaacagcggtacccgttaaaatcaagtatccgcaagatactgtgttgctcaatcaggctcggctcaatcttgaagcgatggcaatcgatatggcacaccaattgggtgtgccgaacccacgcatgtataaacgtgaagccaaacactgttggacggcgttttcgcgccatccaaagcaacaacgcggcggctttcataagcaggtcaaagcacaattgcaatacgttcgtcgcgatctgcgctacatcaacgagttcttagaccttggggcaactttgccagaaaagcaggcaatccgcctgggagtcattcggatcttgtttgaccaacagtggtacatgtatacccataagacgcatcgcgtcgaaaatcgtattgtcagtctccaacagccatacatccgcccgattcagcgtggcaaagcaaatgccaaagtagaattcggcgcgaagattgattgttctctaagcgaaggcgtaatcgatatcgaacgcttagactttaatgccttctctgaaggcaaagactttaacctggattattcacctcggtatttgggacatgaaatcgcatctggccggtctgaaagcaacgtttggagcgttgcgaatactgactgagcggagaagttggtgatcgatgcaccacgaacagaccgacccagttttcggctcgacgcacgacctattcagttattcagttcaggtcgccaactgatggacttcgtccatgagccgactaaaccagttcttgtaaacatagttagtggctggtgaataatttgtccaagttatttgtaacagtccgttaacccgttatcgttgtacaatagatgcataggttttccggcatatccgtgatttcccatgcagttatcacaaccctatcggaggcgttatccatggtttatcgtcaaacagtcacgcaactgtcaattgagtcctttggcaccgctttgagcacaccacttagtgcagacaacgaatgggttcagcttgcggatcaaatgccttggcagaaattgagtgaggcataccaattagccttcccgtcgaaacttggccgtgccggcaaaccgttcaggttgttatatggggcccagttgatcaagcaacggactggtttatctgatcgagatgttgtcgaagccattcgtgacactccggcctatcaatacttcattggcattccgcagtatcaactcaaagtcccgtttgatcacacggcactggcgtactttcgtcggcggatcgcgccgatttcagaattgatccgcaatatcatcaccgatgcggttcgcgaacgacttcaacgccacttaccaaccaagtcggtgatgatcactgacgccacgtgcacaccagtaaacattaaattcccccaagatacgcatctgcttaatcaggcgagaacaaacctagaagatgacattaaagttatggctaaacagcttcaaatcgcaccgccacggacttacaagcgtgaagctcacgcaaagtggactgccttttctcgcaaaccgcgacgctggggaaaattgacgcaaaagcagatcaaagcccagctccaatacattcgtcgcgacttgcggtacgtggatgcgatgatcgacaaaggagcgactttaactgctgcgcgggcaaagcgacttggcgtcattcgcttagtctttgaccaacaagattacatgtatcgcaaccacacgcatcgcgttgaaaaccggatcgtaagcttgagtcagccggaaattcgcccgatcatgcggggcaaatcaaagtctccagttgaatttggaccgaagatcgatgtttcgatcatggatggcgtgattgatattgagcggttttcgttcaatgccttcaacgaaagtagcgatcttggttcgacacttgatcactattacgatgtgcatggtgaatatccagacgaggtgctgttggacacactgtatcgaactcgcgaaaacattggcatgtgtgccaacctcggtatccgtgtcagtggaccgcggcttggacgtaagccaaagcatgtggatccagcgcagcgccggcaagatcaagacgcagagaaccggcgtggcgaaattgaacgccgattctcgttcgtaaagggcaacctcggattggctctggtcaaagagaagactgccgagacgattgcggttgccgtagacactggtgtggtcatggcaaatttggagaatctactcgctgtcttaggtggaccaatttcagtgaccgccaaaaagaataagactgcggtgaagattgattacaaagttatcgtggattcagctgaaaactagggctaattcaccagccactagttagaagcaagatgaatcaccacacgacgggcgtgccaagtaatcctaccggcgatgtgaaagagactgaaccgtagcgaggagatggttgaacgacggtcttccgagacaaagagctgtttaaagagctgaaccaggttataggcaataccggtgatcaaggctcgtgcagtgttccgtgcaaaagttgagctgtctgttttgtcaaagccaaacccgcatttcagctccttaatttggttctcagcattgccccgctgtctataggtcttgaacaaagtctctggagcctcggaggccaggctggtcactacgaatgcgtggttccagggaactagctcatctgccgtatgagtagaacatacgataacacggcgagctttaccccatgacgcggcctgatacttgaattcgtggtagacgcatttgctctcttcatattttggagggcaatccactaaggccgtttctgccagcttcccaagctttgaatttgccttgagtcgaaccaaaaagtcgacgccatgtgtgtcgcacatctcgtaaaattttggcgcagcaaaccccgaatcgcctcgaatgatgacgctggtgctttgagggagcgccgataggcgcgaaaaagttgtctcgacgaacttatcggcttccttgccggtgtactcattgccagggcgcatcaaggcgtctaagagcaacccggactcttgatcaaatacaacctgagggtgatatccataggccatatagtgagcgttgaaggcggaccgttcttgattaccgaaagtatcacaatgcgttgagtctatatccagcacgaagcgggattgaccactaagacggaaagccaaggcggctacttgccagataagcttccgaaagtcatctaggtcggcgtcttcaaggcgcttgaaaaaccgtgaaagtgagggctgtgagactagccgagagctacccaaggtggccgccagtacgggatcacgttgccagtcattggcactactgtcatgtaaatacccggcaacgtcgagcaacaatttttccaagaagatgtcgatcatcgaggccttccagaatcgtcgttggtctggtaacttgaggcactgattggcaagttgcctaaagttgatacgatgaagaaactcttggaacaaaacgagcccggcgtcatttgaaagttgaccgccgtcggcggtcagagtcacattggtattgcattgcagggataagctggttaaagttgagatggtgtgaagcctcgctttcgtgatggttttcgttgactcaaccttagcatataggcgcacccaatgggtgaaacaccaaagcagcgcagtcccgtgtgaatcgtgggattgcgctgcttttttgaaattctatgaataatccaggtttaaggagaccttggaccactactttgacttgcacggacattatcctgatgaagtactagcggacacattatatcgtaatcgagagaacctgaagctatgcaaagacttaggtatccgcatctgtggtcccaaattggggcgtcatccgaaacacgttaacactgaacaacgccgaaaagatactgacgccgagaatcgacgaggtgccatagagcgccggtttgcctttatgaagggttcactggggcttgatttggtgaacactcgaaccgctgaatcgttggccgtaaagatcgatgaggcaatcgtcctgagcaatgtgttggccctgatgcgggtttttgctataccaatttttgttttggcagaatcagaaggagtaacctatcaaattcgctataaatttactacgaaagttgaaaatatggtggcctaattaaacagccactagttacttgacgccaaatgcggtgtgatcgaaagcgtgagctagaagccgtgaatgataaacttttaccaaatgattaatgttgtgcgcttttcttgtataatgaggagtaaactattcagattgaatgcaatcagctttaggaagaggaattttaatggtttcgagaaaacgcgctttaatccaaaatgccgctacggctttggtgagccaattgattatgatggtcgggcagtttgcgacccaaacaatttttgtgaaaaccttaggcgctcagtatttgggtgcgaatgggttatttagtaacttgatccagtttctctctttcgcagaactcgggatcggtgccgctttttcatatgcattgtataaacctttagctgatcacaatcaagccgcgaccactgccattatggacttgttccgtaaagtgtataacaccattggcttggtgattttagctgctggatcagtgctaacctttttcgtcccttggtttgtggccaaagggtcaagtattgatcatattcgttggtatttcttcttatacttattgagtaccgtggtgagttatttctttacgtataaccggtcattgctgattgccgatcaaaagagctatgttgatgccaccaatcagctgatttggtcgacattgaagtatgttttccaaatcggcttcctgttgctatttcatagttatttcggctatttgatcgtgttaattgcgacgaatattttgtcgaacgtcttcatcacgatgcgctcgcgccatttctatccatatctcaaagaaaaaagcgatgtcgaaattgatccatccatcgtgaataacatcaaaaagaatgttgttggcacggtctccgctaaaattggctcgattgtggtaacaggtaccgataacattttaatctctaaatttatcggcttagccgtcgttggcctgtattcaaattatgcgctgattttgaccagtatcacgcgtttattgacgcaagtgtttgccgccgtgattgccagttttgggaatttaggtgccactgaaggcaacaacaaagataaacaagttgatttatttaatcagtttacgttctataatgcgttttcggttttctttatcggtttggtttcatttgcagcttttccgccatttattaaattgtgggtgggttcgcattatcaactggcagagtcaacagtctggtttattgtcatcaactttgtgtttggtcaatttcgaccggcacttaatatgatcaacgcttatggtttattttggggttatcgcgtgaaatcaattgttgaggcggttgtgaactttggtctcagtttgctactggtgaaatttactagcttaggcattaatggcgtgttgcttgggacgattattggcaatatcctggtcaactcttggtgggatccttggattttattttcaggtgcttaccaacgttcgatgctgggtttttatgcgaaatactggatttacatggccgcttttggggcattgcttgtgattgaaagcttcatcatcaagctggtggcaatcaatcctgtaggtttattgccagtaatgggctacatgatcgttgtagctttgatcgtaggaattgtgttactgggcgtgtttgcgaaaacgcgtggtgaacgagaaatgtttcgattgctcaagaatattgtgcatcgttgagagaacttctttaaatatttggcaaagtcagcaaattactagttttcccatttttgaaacccagtagtttgtgataatctaatactgtatgttttggttcagcgacactggaagctgagacttaaaaccagggaggatttcttagaaatgaaaggtattatcctagcaggtgggtccgggacccgattgtatccaatcactcgggcgatctcaaagcaactgatcccgatttacgacaagccgatgatctattacccaatgtccacgttgatgttggcggggatcaaagatatcatgttgatttcaacgcccaaggacttgccacggtttgaagaattgtttggcgatgggcatgacctcggcttgagcttagaatacaaagttcaagaacatcctaatggcttggcggaagcgttcattttagctgccgactttatcggggatgattcggtttgcttgatcttaggcgacaacgtcttttacggcggcggcttgtccaagatgttgcagcgagccgcttcgaagccggttggcgccacggtatttggttatcacgtcaatgatccagaacgcttcggggtggtggactttgacgaaaacatgcatgccaagtccatcattgaaaagcctgaacaccctgcctctaattacgccgtgactggtttgtatttctacgataacgatgtcgttgaaatcgccaaaaacatcaaaccttctgcgcgtggggaactggaaatcaccgatatcaatcaagaatacttacgtcgtgggcaactcgatgttgagctgatgggtcggggatttgcttggcttgatactgggacgcatgaatccttacaaaccgcgtctgcgtttatcgcatcgatccaacaccggcagaacttgcagatttcttgtcttgaagaaatcgcctaccggatgggttacatcgacattcaacaagttgaaaagctcgcccaaccgttgaagaagacggaatacgggcaatacttattacaattagtccaaaacgaaaccaaataatcactgatacaactcagctcaatatggaggccaaatagctatggcattaaagatcattcccaccaagttacaagacgttaagttaattgaaaccgatgtgttcggcgacaaccgtggcttcttcacggaaacctacactcgtgaaaaattcgttgaagcaggcatcaccaatgacttcaaccaagataaccaatccttgtccgctgaagccggcgtcttgcggggcttgcactaccaatacggcaaagatgcgcaaacgaaattagttcgcgtggtcactggtgtcgttgaagatgtcttagttgatatccgtaaaggctcgccaacatatggccaatgggaaggctacattttatctgaattcaaccaccgtcaattgttggtcccaaagggctttgctcatggtttcatcacgttgactaataacgtcaacttctgctacaaggttgaaggctactatgcgccagacgctgaccgtgggatcgcttttgatgatccagatcttggcattgactggccaatgagcacggatcatttgatcatgtctgaaaaagatttgcaccacccacaactcaaagacgctgataacaactttgtttacggggagatctaatcatgaaaattatggtaactggcggtgccggcttcatcggctccaacttcgttcattatgtgtataataatcatccagatgtccaaattgttgtgctcgacaagctgacttatgctggcaatcgcgccaaccttgaaagtatcttaggtgatcgtgtgcaattggtcgttggtgatatttgcgatgctgaattagttgacaagttaatggctgacgtcgatgcttgtgtgcactatgccgcagaatcacataacgacaacgccttgatcgatccatcaccattcttgcattcaaacgtgatcggcacttacaccttgcttgaagctgcccgtaaatacgacgtccgcttccatcatgtctccaccgatgaagtgtatggtgatctgccattgcgcgaagacttaccagggcatggcgaaggcgaaggggagaaattcaccacggaatcgcgctacaacccatcctctccatattcttcgactaaagcggcctcggacatgttagtccatggctggactcggtcgtttggtgttcgtgcgactatctctaactgctccaacaactatggcccatatcaatacattgaaaagttcattccacgccaaattactaatattttggctggcatcaagccgaagttgtatgggactggtaagaatgttcgtgactggattcacaccgaagaccactcttctgcggtttggactattctgactaaaggcaagattggcgaaacatatttgatcggcgccgatggcgaacaagacaacaagactgttttggaaatgatcttaaaagacatgggtaaagacccatctgactacgaacaagttaaggatcgtcctggccatgacttgcgttacgccattgactccacgaagttgcgcaccgaacttggttgggcacccaagtacactgattttgattctggtttgaagcacaccatccaatggtacaccgataatcaagactggtggcaagctgaaaaggctgaagtcgaagccaagtacgctaagaacggccaataatctttgcggtcatggtcgtcattgcagaaagcgaagcgctcggcttcgctttttcgttgaaggagaataaaataaatgaaaattttgatcactggtgccaacggtcaactcggcacggaattacgtcacttactggatcgtcgcggccttgaataccgtgccactgatgccaaagaactggatatcaccgatgctgatgcagtgaatgcttacgtcaaagacttccaaccagacgtcatctatcactgcgctgcctacactgccgtggataaggcggaagacgaaggcaaagccatcaaccaaaaagttaacgtcgatgggacgaagaacttggcagttgcggctggcgagaatgatgctactttggtttacatctcaacagattacgtttttgatggcgattccgatgaattgtatactgttgaccacaaaccagccccacgcaacgaatatggtcgtaccaagtatgaaggcgaactcgccgtacaaaagtatgccaagaagtattacatcatccggaccagctgggtctttggtgaatacgggcataacttcgtctacaccatgttagatctcgccaagacgcatgacacgttgactgtggttaacgatcaatacggccgcccttcatggacgaagaccttggctgaattcatgaccttcgccatcgatcaaaagctcgaatatggcatctaccacttgtctgaagacaactcatgtaactggtatgaattcgccactgagatcttgaaagacaccaacacgaaggtcttaccggtcacttctgccgaatacccacaaaaggcatggcggccacgtcattcgatcttagatttgtctaagaccaaagcaactggctttgaattgccgacttggcaagatgccttgcatgaatttatggcggaaatcaaacagaagtagtgtaagtttgtagcacttatggtgacttcaaagtgtgtgtgacgaagtccatatgtttcgtaagaacatcaatgaataaaggatttaaaacaaaccaggtttaatttgtacttgagctgagcgggggttggaccctgctcttttttgaaatgggggaaaaatatcatggtaaaggttcgcaaagcaattattccagcggcgggtttaggtacccggttcttaccagcgacgaaggccttagcgaaggaaatgttgccaatagtcgacaagctgaagacggcatatagctttaccaggtaatgcgaagtttttgacaccactcggcgaaaaaattgtccaaggtcggcgaagaaattgaccaacaatacagaaacctcctgtatactatgggtagcatacgtgtaagcgcgtgcaattcttaaatacaggaggtctttgtaatggctattcattaccgtcaaattcttgagcttcacgctcaagagctggtgcagcgagacattgcggcaatcactgggaattcacgtcccaagatttctgaagttatcaagcaagctgagctacatcagattagtccaccatttactgatgatgtggatgatatttggttggaaagcttgttgtttcctcagaagcaaccgatggcaaaaggtcggcagatacccgacttcgaaaagatacacgaggaattggctaagcctaacgtcaccttatccctggttcattatgaatatgagcaagagtgccgacaaaatggcacaattccgtatgcgtatcgaaccttttgccagtattatcgtgcttatgcgcagaaatataaggcaactatgcggatccggcgtaaaccaggtgaagtgatggaggtcgattgggcgggctcacctttgcatatcgtcgatcgcgaaactggagaaatcatcaaggcatatctgttcatcgcttctttgccgtgtagtgcgtacagctactgtgaggcatttatgactgaacaacaggaggcgtggcttactggacacattcatgcgtatgaattctttggtggtgtgacgcaatatctgatttccgacaatctcaaaacgggtgtgacttcgcacaagcatagcgaaatcatcttgaatgaaatgtatcgagatctagccttgcactacggcacaattgtgatgccagcacgagtccggaagccaaaggataagccgactgtcgaaggtgttgtggggacagtatcaacatggattatagcagcgctacgaaatgaaacattctttggcctcgaggaattaaataaggccgttcgcatcaaactcaaggagttcaacgaacggccattcacaaagaaatataaacaaggtagtcgcctttcggcgtttcatgacgaagaaagctttgccttgcgaccattacctgttcaagcttatacgatggccagttggcggactgccatcgtgcaattagactaccacatcaacgtggaaagtcagttttactctgttccttacgagtatatctcatctaaagtggatatcaaggtgacgaaagatatcgtagaagttttcccccagtttacaattcaagtgcaacaccctgacgactagaccaaaaaggccatgaagacctattcttgttagtactagctaaacaagaaagcaggaatcttcatgacccactctcagactaacacccacaagcattaccaacaactcagttttagcgaccgtgctacaattcaggcccttcgggctgttggtgacaccgcgaccgtgattgcacagaagcttcatcgcagtaaagcgacaatctcacgagaaatcacgcgtggatctgtaactcagctcgactcgaagcgtcactcgcatcaagtctatcttgcggaaactgcccaagccatgcacgaccgtaaacgagatagaaccggtcactacgcctttcttaagaccggccgtgcgttcttcaaggctctcgccagggagcttactcgtaagccgcgcgtacacagcgttgatagcttcgtacacttctatcgcgaccagggcaaggcttgcccttcaacgacaactgtgtatcgctacatcgacgccgggctgcttgagctagacaacatgacacttcccaagaagctccgacgccgcatcaaaggctataagaacgcccacaagcgcaagaataagaagatatacggcgactcaatcgagttgcgtcctgcggccgtgaatgaccgcacaggcgtgggacattgggaaggcgacttggtcaaaggtattcgcttagctgatgagccagcattaatgacgctcacagaacggtacagccggactgagatcatcgtcaagattcctgactatcatgcggacacctgccttaaagccttgcaggacacgatcgacgactacggggccaaggaatttgagagtatcacttttgacaatggttccgagtttgccaagttatcagagattgttggaacccagatttacttcgcacatccgtactcgccttgggagcgtggcacaaacgagaacgccaatggactgcttagggaattcttcccgaaagggaagtctctcagagcagttaccctggttgaaattcaagcagtccaatccgcactgaaccatcgtcccagacgtattctgaactatcttcgcccatgcgattactaccgatgcatggcgtaacagcctagaccactatcaagaattcgttatcatcgttgcacttgacttgaaaattgaggtcgtagaagttttctacaaaggtaatcgaattgcctcccataaacgactaaccggtaaattcgggcaattttcaaccaatcacgatcatttgccagcagaacataaactgttcgtcgatcatacacctgagaacgcattagcttgggcggaagaggttggcatcaatacgcttgccgtaatgcgatatctacttaaatcggcggcaagtgaaaaacaaggtctaagtgcagcttttcgattcaaaggcttagctagaaaatacgcagctattgaaatcgaagccgcgtgtacgaccgtgatgaaaattgcgaccgcaccgacggtgtccgtagttgaacgggttatgaaaagtcaaaagattccagcaccaaagacgattaacgaacccgactacggttttactcgtggtgcagcatactttggaggaaatgactaatggtaaatgacgaaactcaacggaagttacggcagatgaagcttacctctatggcaaatgccttggaagcacaggaaagcaacacagaatatcgatcaatgaactttgatgatcggttcaagttactcgttgatgcggcttacgcaagccttcagtcaaataggctgaatcgactgatcaagagtgcaaattttcggacgaatgagccatgtatagctgatatcaattacttgccggatcgtaagttggatcggaacttgattcaacgccttgcgactggcacgtatattcaagagcaccataacgtcatcttaatgggtgcttcaggtaacgggaaaacatggttggcgacagctttggggattgaggcttgccatcagtttcataaagtaaaatatgtgcgtcttcccgaactgattgatgatttgattgtagcgaagcatgaggcaaacggtgactttcataagattattgaacggtacaagaaagttgaactcttgatcatcgatgagtggcttttgacgccgatcaacgatgaacaagctcagactattcttgagttgatcgaatatcgaagtcagcgtggttcaacaatcttttgtactcaattcgcgccggaaggctggcatagtaagctgggaaatccacagattgcggatgcgatccttgaccgaatcgtccacgattcttacaagctccttatccaaggcgacaaatcgatgcgcgagcggtatggaatcggaggcgaatttgcatgatttcagtagaactggaacaacgattggcgctgttctatgcacatacagacgcaatggaagactgggaaaacgtacttggcgatgcgctggtggatattatctgggaaaatgacgataaattgaccgatgacgagcttttcgaatatggaaaggaagtcatcgtgaaatacctgggcaagtgccgaggagacaagctcccgtaaaactgaaaatggcatcgctgaaaacgctcagcgatgccatttttgaaattcttggtcaattctttcgccgagcggtgtcaattttagcaccgaatggggtaaaaaagatcgccgagttgggcaattcgcttcgccgccttcaactaatcgatgtggaagaccataggtctttaaaaggcgtttgagaaaatgataggccgagttaaagtcacgcttcttgcgcagttgaaaatcaagcgtaagaccttgatcatcaatggcacagtagaggtaattccattgacctttgatcttgatataggtctcatccatacgccaacttttggaagtgcgccgatggcgcttacgccatagagcccgcataatcggtgagtaatgttgtacccaacgcatgagggttgtgtgatgcacgaaaataccacggtcgcgcatcatttcaactagatctcgataactgatgttgtaacgcaagtagtagcctacggcaaaagtaatcaccgattgattgaattgccgtcatttaaaatgatcagtcatctgaaaacctccagtttaaattcatgatacaggatgcactctccctgagtaaactttgcaccagaaccaagcggctgaggcgaatgacgtttttgatctggctaacgccgaggagcgggataaatcggaagacaacgacgagtggattgaggacgagcagtatgcttatggcgatgattgggatggggtctgacctggacgggatgacgacgacttgacgacccgcatattcttcactttgtagatgaaacgttagcacatgcagatcacgttttacgcggtcaacgttatggtcgttgattcctagaaatcgcaatacaccaagattatctttggacaaggtagaaattggtttatcactgacgggatctaagctaattctagagtgcataaagatacccggcacaccccaccacgttggtttaagcgaagggggcgtgccgggcattatttttagattccgttggtgataatccagttattgtttggcttggataggatcaaggtgtattgcgatatttggctcatgtcattgtcagtgtcgagatacttcacagataacgtgacagtcaaaccgcgcttagtctgcttaaagactggatctagaagttccacgaacttaaggttgcgttcgattggctgcgtgccgtccttgacgtaatacttgagttcgttgcgatcactttgcgggtacaaagcgaagaacgttttgaggaacttggttacgtcgtctacggtgctgctggctaccgtgttatcagactgggtatctgggagcttgatccgggccgtcgctggttcagccgcgatggttgggttcttagtgaccaccatatcgccgttgtcattttgcatgacgttgatggtgtaggtactggtcacagacttcttgtctttacctttggtgagatcttgtttcaccgtaaatagtacgcggaatgtgtctttggccgtcttgctcacgtcccagaccttgacctcactaactgtggcggttgtaggaatatcgctccgcacagtatctgcgttaagcgattgcagttgctccacgagatacggctgtaaggatttctgccgctggtcgagggtttcgtggcttggctgccacgagtagtagagcttggcgaagtcggtagtgaaggtcgccaaggcgtgtgtatcaattaccttggtcttgatcacttggacttcatgcaccgtgtgggtgtcaatggaggtcatgttcttgtagacgccgaagctggtgctaccgatcaacaccgcccaacaaagcagcgtgaccggacggcgcaagccgcggtgcttaatttggagtgaatttggcgcggctggcttctttttgaaccagcctttcttttgggttttgtctttactcaaggttcgttcaccttgtcctttctagtttcatagcagcggtaaaagtcatcgtaaatatcaagaaaacgcacgaacaagcgttgcagggagatgcgcttgtagctctcatagtcggtttcgatatactgaccgagctcacggtcgttgttgaagtattcttcagccaagtagcgttcgcggtcgaggatatacttgcgatcttctggggcaaacaccttgccaactagccagtgctcaaccgcaacttcatgggccacagccagtcggcattcgcggcggtggccggactccatttctggcatacggtccacgaagcggtcgatcacgttgcacaggtcgtcggtgttgggctttctttgtttgaagaacttgattcgttcccattcgctggaagcgaagtcgagttccttgtttcttagcgcgcgattgtcaccaaatttgagatcgacgtgagccttttgcagcgcgtcgtcataggtgttggtgatgagatccatccagtcaaaatagctgataccgttttgatccatcgtcttcacctacttcttcacacgcccggcgccgatcaggtgggattgccaatagtttgagttcaagtcggcatagcccagcgggtcgcccgcattatacattttcatgccgtcaacgtagatcccaacgtgggtcacgtaatctgcggtgtcataggtggaatggaagaacacgaggtcgccgggtttggcgcctttgatgttcaggtgtgctgtggcgtcgtattgtgcttgtgcggtgcgggggagtttgatcccggctttgccgtaacaccaactagttaatccagaacagtcgaagcccgttgctggcgttgaaccgccgaacacataacgagtgccttggtacttgagcgcttcgtccatgatggcttgcaccgtgttgtcgtcgaatttagcgccaccagtgacaaggtattgcgagatgaccgacacgtagtacatgttcccataggcatagcgccaaccgtccttggcaaccgcgttggtgtaggtgaatttcttaccaccagacttttctttagcaaaagatgttgccagctcaagcgtgtactttttcccgtgcctagcaacgtagtcaataaagccgccaccatagttgtagctttgaatcgcggtgtttagatccacgcccgcagctttcatgctttttaacagcgaagcgaaatatttcacgccttgcttgatggatgattcggtatctagcgtattgaccggtaggcccatcgattcactagcttgcatcacgtcgccacccttgccacctgattcaacctgcatgatggcaagaattaccatcacttggtccgaaataccgaactccttgcaatacttttcgaccatcagcttgtgcttgtagacttcagcggataagttcatcgcgtcggctgtgaccgcagaggcaggctgatcttcgtcatcatcagaggcgatgactgcaaaaaacagaccgcccatcaacagtattgggagtgcggcgagagctaaccagtgccagagcttcatcgcttcttatgccccttagccttttgaatccgctgcggctttgggtttcgtggcttggttgggtttcgtggcttggctggtttttcggaaacgagggtcaggagtttcttggttttattcattggcggagtaggttcttggtgcggtttgatggtgggttctgcttgcggtttcgtgactggacgtggaggccgagttgaagttggcttcgtggcagcacgcttaggttgtccactggtatcagtttgttcaggctttggtttggtaggtgtggcagttgttggcttacgagttggttcaaccggcggcttggtagccgttggttttggcttttcaggatcagctttaggcttgatcgccagcttgcgttcttgcatttgcttacgccgctgctcaagctgtttgtcacgttcctgctgattagcctcacgccgacccttgaagctatcttttgcagtttcggcggcctccttggtcagttgcttaccacgatgcagaccatataaaacgttggttggtgcgtccttcacctgatcaaggccgcgtttagtcttgtccttgagcttgttgccgacatcagatacatcggcaaatttctcacccagacgttggctgcgtggcttcttggtttgttgtggcttggcagcgtccgcagtttgctcgcgttgcgtaccagcggggagctgtggtgtttgcggcattccgcgcctcttgccatagccccgcgacaagaagcgtccggccattgcgccacccatggcactaccgacgaactgtcgtagcatgcggttcccacgacgcgagaagcgttgtgcgccttgctgggcgtcagagctgtggagatgcatcatgcccattaggtcgccgagcttcatccagataccggcgaagatggtaacttgcaggaaggccacgaggaagaatggcgaggtagccgacaacccatagaccattgccgatagcgagaaagccatcgtaatcaccagcgtcacgccaactcgtgtcatgatggtgttaaaaagcttcataatgttctgcttcatcaatccgttaaatgacggcagcatagcgagtaagaacgacaccggtaagaacgtcgcgtagatgatgaagaggatctggctgaacagcatcattgccgtcaggaagaagacaaacaaggtgatcgcaatgttgaacaggacaacaaaggtcgtggtaccaaggcgattgatcgtcatagttggcgagagattctcgttatcgttgtcttcaatttcagccttgaccacgtcagtacgggttttgcctttgtcgccaaacgggtcggttttcattaacgtgtttacgcggtctttgccaacggtatcagcgtcactgtcgccaaactgtaaaagcgtccacggctgcttcacctgaatttcaaacagggtgtcacggatcgcatcgacacctgatttatctgttgcggtatcagtgcccataatcatcttggagccagtgttgagcgcgctggcgctgatgtcgctactgaactcgttgattttgctgacgtaatctggggcataagcgataaagctggctgacgtgatgaagatcaccacgaagttgacgatcgccgaaatggctttcgaggtttcacgcttgatgatgccagtgtaggccacgtagataccgacgacgagtgtgatcatcaggagcaagcccgggtaaaagccgtcagtggtgaagccatcttttgacaccccagccaagagctgcatgttcttcccaatcgcgtcagacgtatctttgatgaagtccagcgagtaggcttgctgaatcaggtagcccgcagcgtttgagaggtagacagaaagtgtccacaagaagttggtgatagcgtacaggccatagctaacagacttgccgataccatcgccccaattccaaggcaaccagtcccaagacgtatcgacgaagtagtcgagctgatagtgtgacaacgggtacttggaatactcgttagagccaccagactgatcgtctaccaaccccgctgcgtgtaccggctgaccaccagcaagcaccagcatcaacataaatgccgcgacaacaccgaggaacagcagaagccgccgacggttagctttcgtcatcagcgatcacctccacgggtttcggtggccgagtgtcaaaggcgtggtgtaggtgttcaaagatatagtcaaagtgcagcacgccgacgtgcccccagatgtcttggaacaagcactccccattatctagtgaccggagccggttttgattaccttcgtcttcggcgtcgaggccaaagaagttcaaggtgttcttgatttccgtgatgtcggtactgcggaaggcgaacttctgggcgatgttgttcttcatcttttcatcgagcaagtcgtctgcattttgagtgacgaggtagaccccggcattcatggagcggccttcacgaattaacttcatcgacaaggctttgccttgcgcaacattgaggaacgcccaggcttcgtccaagtccacgattttgaactgggcgcggttttggtgaatgaagtcgatcgcgaacgtgctgataatcatgagcatggcgacggacagcatttcagcagtgatatattcttcctgcgtcttgtcggcgtctggaagcaccaagtctgcgatctgcacgatgttgatcttgcggtcaagggcgattgtccgccgcgccgtcccgtcagagaacagcaatgccgcaaagtcatagtccgtgaaggattcgatatgatcggcaatgttacgtgcgatcggcgtgtcttcgcggcgaagttcatcaatgactttcaacagtcccggttcaggagcttgcgttaccgcgcgaatcgctttgcgcagcgtcggaaagcggtcggcgtcacggcttgagatccccgtgaggaaggtcagggtatcgacggccagcgattctgaatctttcaagttggacaagatgatataaggatcaagcagcccacggttttgttcttcactggtcaggttgacgatgttgatttgatcttccataaagtcgaggttctctgcccagccagtacgttccgacttcggatcaagaatcagtgcctgtgcgccgtaaagtacggcgtagtatacaagcaagttgttggagaaggactttccaccacccaagctaccaaggaaggcggcggataaggcgttggtgacggtgcctttgatgccttgcgcggcaatgtctggttgcaagtagacgttgcgtccagtgtctacgttatatccgatgtagataccttctttttcaccgagcgattgcgtcgcaccaaagcctagtgaggcgatgaaatcgctggtcacatactggatatagtcgttgatatagcgctttgaagcggggataaactcgctgtgaagccccagcatgtcgccgaatggccgcacgagcttgatgttgaggctgtcgtagaagtcgagtagctgatcagcgcggcgcttcatttcgtcttcactccgcccagctacgcgaatgacatagctgatcttgtacatggcgtccttagtctgatcaagattgctttcaagctcatcgactgaatccaacgcgtcgctgaccccacgcgtcatttcattgccggattgataagcgtgttcgtcgaggtctttcaactccttctttttgttacgcaccttggtcagcgcctttttgttggtcacaatctcaacgttcaggctggtgtcgattggaaaatcgaactggctttgttggaaataaaagatttcactgccgggaaactccaattcaccaacaatgtcggaaagcgtcaggtacgtcacgtaactgctatccagcccgtgggtgatcttgatcgagcgttggtgctgctcaatcagtgagcgggttggcttgatcaggtcatagcccttgataatcgtgtcgcgcttggacttcttgcggggcaagtgatagtcatagtcatcgtagtcttgacccgtcatgccgtataagtgctccagcaagtagccgaagtcgttcttatcgagcggacgaactttgaaccggcgaccaatcttttcggcgagaaactttgcggacttggcgtagcgttctacctccgcgttgttcatggtgaagaaatcaccagcgaacgttgtgttgaactcggagaagaagtcccgaatgcctaaagacatatccttgaagatagacttggcggtaacctctgcgtcgttcagcaacagcttaaagccgatgaagaagcggtagtccacttggttgtcaccgacattttcagtcaatgcttcggcttggccgtcgatgtgctggaaggcgatgtctttcagcgaccccttgaccaacttcttcgagcggtcgagagtgtcccacacactggcttcggtggcgagctgcaataaatggagcttgccgtcgcgattctgcgagatcaactgacgaaagttctcatggacttgttgtttctgttcagggcttagaaacgagtagttgtacggaatcaattcaaaataggcaaagcactcgttgtctgtgttccagaccaaattgtcctcaatatatttaattggaaatttcattgtggtacctccaaacgtaggtcacagcagcaatttgtttctctttctgcgacttcacaggtttaccagcataggtgagcttcggggtaatggcgtagttgatcaccgaccgcaagaatcccattggcttcttgttgtcgaaggtcttctggctcatgaaccacgttagcccagccggaatgccgacgtacttgagaaacacgccgtcaatgaatgatagtggtggcaagtcgcccagaagcatgactgcaaataagctgacgatgaaccacgtcatttgcgtaaaagtaattgggaacggtagttgcaggtcattgatggcatacagcaccttttccactgaccagatgctggtgtaggatctgactttcttcatgtgatctcctttcgtagtgagataaaaaggctggcgccttttgcagcgccagcccagagagttagtctaataattggtagatgccgtaaggtgtttcaacgaaacctccttcaatttcgaggtcacgtccgaccttggcatagtcgatatagttttcgacttgtggcggaatgtcgccgaaccagccttcgtcagccagttcttcggccaactccgccatgttcgcgacgtgatagcaggcgatgtcgtccttgtgcgccgcgagttcaatcacgttgtcgtaccattcgccgataagctctttgatggcagggtaaatctcggtgcctttcaatgcttcaacggctgcggcagcttcattgatctcaccaatcgttgaatactcactaaagacaatggggccttcgtagtcctgaaccatgtattcttcgtactggtcgttcagtcctagcttttcagcgagttcttcgttgttgattggcggcgtgaaccatgcgccgacaatctcgccctcgttatacttgccaagattggcaataaagactttgatgtcgtccataggctaagcccccatgacgcggttgaatagattcagcagtacgtctttgaccccggcggtgttgaacaccaacccgacggcaatgatcgcaatgactaagaagccgatcagcttggaaaactcgcgcttgaagccgaggtagaccccgataatggcaatcgccatcagcaccaagctctgggcgttggaggtgaaccagttaaacaagttttgtccgaaattcataataatcatcctttgatttttagttttgtgaccagggctcctttcaaaattgctgctgttttggcgcggtcagcagcgaccggatcatgggtaacggatcagaaaagttcagtttgagttgcgtggtggtgcttgatgcgatcaagggcacgccaccagtattcttcactaatttcataaccgatgaaatgacggtcagtgtccattgcggcaatcgcagtggtaccagaccccatgcagttatccagcacgatctcgccgggttgagtgtaagtcttgatgaggtaggcaaaaagatcgacaggcttttgcgtcgggtgccagccggtgcgatcagacttgtagttgagcacgtcagacggatagttcgtccattcttgtgtgtagctatcgggagcgttccacgggtgcagctgatttgagttctcgtatttacgtgagttgacggttttgttataggggagcagtgcttgggggaagtagttcatgcctttggtatcgggggagttaccaaagttggccgtacccgacttggagaagacgagaatctcctcgaaacgggataaggggcggttcttggcattgacgaagttggtgacagtattcttgatccaaacccacttgtagcgatacaaggccgggtttgattgcactaagtccgcagagaaccgttcagttgcggttagcacaatcgcgccttggggtttgatgagccgttcgtattgacccccagaggtgggaaaacggaatcaccttgtcccaagcgtttgctgtggtaccatacggcaagtcgcacaggatcatgtcgatagaggctgtcggtaagtccgccataccttccagacaatcgcgattgtagatgacgtctagttcgattgcgttgatactcctttagttgaatttgtggccatcgctcctttatgaattgcgattgttttggcgcggtcaatagcgaccaagtttgttaatcgaaaaataggtcttccactggtgcagcgaagaccggccagcctgattcttcggctgtttgataaagcagtcggcgcagttcaccgtagttcaaagcgcgaccatcacggccaatcaatgccgccgggtgttcttgttgctggtgccgccaagcaatgtagtcttgtgccgtgaagcccaaactgttcatgtcgcaaatgcgccggtacttcttgtgttcgaccacgccgactagtgcagccttgtagacgtatacgttcagtacacagtctgtgaatgccttgccgcgcagcgggtgggaagcaagcacatcattgaccaaacatgtcacctcctagctcctcgctaccaacagtctgttgctcaattagcttgaggtgtttatcggtcagttcggcgtccttgatcatgagctgtaagtcagtggtgccgaagtagttgtcgatttccttgatgaccttgagtgtgggcatgacttgcttttggagccatgccttggttttgttcaggtcaaagggttgtgggtcagtagtcaggcggatcggttggcgacctttgccaaggaagtatgcccaacgttcgttgagcggccacttgagacggcttttgtccgggacttcatcaacaaagcgcatgtagcgggtgataataccgaaggcgaccttttcggcgtcacgggttatcagcatgttctcaatcgccttgattgcgcgctcgtttttcaaacgaatttcaaaccggttgatgatcggggtgtcggcaatcgagatactacgtttggcagcttgttcggcagccttttcgtagatgcagaaatacacgtcacttttcatcgtgccgacgtaaagcgtattgcctcggccagcttcgtcgagatccacgagcttgcctgattgcagcccttggaacgatcgcatgacggaaatgcattcattgttcagacacttatcgaccagctccggaatgcttagcaggccaaccatgtcgttaatcgcaatatcgacccgcttgaagatgccgccagcttcatcaacccgaagaaagtagtcgtaccagttctcaccatgacttagcagaatgccttcaaactcgcggcaaccttggcctttcatctcaaccaatgtgccgaggttggagccaactggtgccaccatgacctgaatgttagagaagatatacatggccgaatagccgtagaagccatgttcctcaaatatcaggtgttctggggtcagaccgagaatattggtgatcacagtcttggcgtcatgtgtcgggaaccgcacgcgcatgtagtcaaacatcagcgtcagttctggttcatcgttccagttcttgagtagccggtcgatttccatttgcagcgatgagctagggttcgtctttccgttttccacttggacgtaatgcatccgtgtaacacctaagcgccgggcgacttgagcttgggtcagcttgagttgcttgcgtttggttttagttttttcatgccatgagcacatggcaacgctcctttcaaaaaatgatggattgggggtgccatccatcattttgccttcttctattgaaacgccgtcatatcaacctttctaccccgtgctcaggcaaagacgttgtatttaatacccccctgttagagtactgggggtaagcggtcggcgccagccgaccgctgccactcacgcctgcggctttcgcgctgcacgccgcgcgtggcggcagggtgcagccttgctgaacagattggttagtcatagtcctgctcctttcaaaggctttgtcttgacgacggcgtgtagccgattagtaatgatgcgcccagctatgataggtgagctgcatgccagtttgcgtcatgttagctgtgaaccagaagtagacgggcttgcccgaaatagtgcgatcaccgacgagctcgagccagtgatcgccgtcttcgtaaggctcaatgtaatcgcacatttccagcagggcgtcttctgcgtcctctggggttccagctataatcgtgtcagcgtagtcttcctgaaaacgactttgattgttaataattggtattctcatgggttctcctttcgtacttgtgatttcacgtttcaagcatcgttatatggtataatgatgcttgaaacgtgaggcgaacttaatgtcagatttaattgaatccttcttgaagcaaaataacgggcaggtaacgactgcggatgctagaaaacttggaattgatccacatctgcttattgatcttgcaaaccttggtaagctagaacgagtagggcgtggggtgtatattgacccggcgatatttgaagatgacatgtatatccttcagtatcgttttaacaaaggtatctactataaagacactgcgctctttttgcatcatatgatcgacaggacaccggatcgttaccaaatgaattttcctcgcggctataatgcaagttcactcggcgagtttcctgtgcgggtctatcgtcaaaatgtaaagtggcatgagctaggcgttgaggaagtgctgtctccgggtcagcacaaggtacgggtctacaatattgagcgaaccctctgtgatattttacgagcgcgtgattcatcagattcggaaactattcgtcaagcaatgattagctattcgcagctaaagcaaaaagatattgggcggctggtacgctatgcagatttgttcaaagttagagaaaaaatcaacaactacatggaggtactactgtgaaactaggtttttcaaatgggcaacagttcaaagccaaggtgcgtaaccttgccaaggaaaagcagattgatccccaaatattgatgcaagaggtggcgttagacgagattgtagatcgtatttctcgttcgccttaccgggataacttgattctcaaaggcgggtttctaatcgcgtcaatgctaggtgttgatacacgggcaactcgtgacgttgatacctcgatcaaaggcttgccggtaacaaaagaggaaatcctcaaagtgtttacggacatcgctgatatgaacgagccagacagcgacgtaacaatcagaattgctaagattgacgatattcgtgtcgccgcagaatacgctgggtttcgcattcatatcgaagcaaagatctacaacagcgtcgtagatacgaagatcgatgtttcaacgggggacacaatcacgccccgcgaaatttcatggcatcatcgtacgatttttaatgatcaagatattctagttatggcttacaatatggagaccattcttgccgagaaactcgaatccatggttgtgcggcaagaacttaattcgcgtatgaaagacttctacgacttgtatctgttcgataaggtgcaacggcagaatattgatttcaaagtcttaaaggatgcattgcacgcgacggcggatcttcgtggttcggaagcactgttgccgcgatactcagaaatcattgcaacattgcgtgggtctgtgctattgaaacagcgctgggaaaagtaccgagtggcctacgtatacagtgagaacgtcacttatgaagccacctgcgatgctgcattagatctggtgaacgagatcggattaccatagatctactcctcatcgccttcatctgcgacattggtgtaagtcatgaccaagccaccgtcgtcgccagtagtgacgttgaaccaaaagcgcttcggaaaacgatcagcggtaaggccgccgggagcgcccatccagatccgtgaatctgggtactcgtgggcgtgcattgccatccattcaagttggtcttccgcgtcttcgtcggattggaaaggcaagttctcgtgaaagtcgttgaggaattgcgcgtggttttcgattttgacatcagtgctcatttgatacctcctgttctgttggggttgcgggtacggtattggctacggcaacaatttcggtgaggaaatcatagccgcgcggcactagtggtgtgtaaaattcagagatcacgctgccgcaagtgtccacatagccgcgtcccttgatcggtttttgaaagaagtctttattggtttcgccgaacatcatggaatagcccagctcactcatgcgcccaagcgcaacgcggaacatgaactgatctcttatcccgtcgcctaaatattttgcgtcaggccgttggcaagccaacacgaggaagaagccggcttgacggccaagcatgacaatctgtttgagcttggacatgacttgcatagcatcgcggccaagcatatccatgaaggcgacatattcatcaaaaatcagaaagtgggcgggtagtccaagataggcgtagttctcgccggtcttgtacccgtccatttgtttcattttgtcgttgcgcgccatcatgtcctgatagaaggtttcaagcgcaccaagcatggcctccttcttcgagtagacccctggcatcacgtctgccagatcggcaaggtcggcatttttcgggtcaagaatggtgagttgggcaccgtctttcagaagtgcttcaatcaacgtcaaaatgaagtaggtcttcccaccaccagtgccaccagcgattaacatgtgaggcagtgcgtcatagtgccaagccacagtttccatgagctgaatggagccgtgttcacaggtcacgtcagcaatggtgatacgcttgccgatcgtgtcgtaaagcaaggtgtactcgacataagaatcgtgcaagatcttgtctaccagctcacagtaaagaccggcttcgagcttcttttccaagtgcaggagctgatcttgataggaagacatgacgatttcaacggaaacgtggatcagcccgtctttgagccggtagtagattttgggaaagtgcgagatcttctctttggtgcgcgttgagcctaagtccttgaagaaactctcgctgttggtttggtcagtttggtaccatttattctccatgatcatgcgggcgagcttttggcggtgttccatctgcttgtaggaatccgcaaaccaagttcgatatgaccacaagccagcgccaaagagtagcgctgtgcataaactgttaataatcagcggtagccatgaccaaggcaaggcggccacgtccggccaactaaacaacttccagttgatttgtcttagcagcggccaataggcaatggcagctccagttacccacaagcaaaccacaaccgtcatcgccgtgttgtagagtaagttgcgttgacggggatagacccgtgtaccgcgatacgtgagtttcattcgtcaatgttcactccgtcgtagccaatcacgagaccaagtggactacttgaaacgttgaaactaaagcgcgcgccttgaaggtaggcttcgggtttcgcacactgctcgctggctaaaatcaggtcacaagcattcatgccagcttgaatcgcgtgattagctgcgtcgattaagttgatgatgacgtcaccagtgggtgatgcaccgttgtcaaagtcagcgatgtgttcgtagtgaaattgaaagtcgtccaggttgacgagggttacttgatcattcatagaaattctcctttgggcgttacttgacgccaatatatttgatagcgggttgtcggtcttcggtgtcgatattgaaactgaactctttggattcatgatcgcgggtacattcgccgtctacccaaatggaaaatggttcatcaggattggcctgttcggcggccatcagtaccatgtcgatcaaagcgtcagggctggggtcgtggtaatcagggtcaactagttcgggatagtcctccaaaaagccgtcaatgcttagtgcttgtgccatgtcatcagtcctttcattcatcgctgacgcccagatacgagagccgcaagccatcttcaccttcgtatgaagtgaacgagaacagcttattcatgccgtcgttggtctgttcactgtcgaaatgtaggtgttggtaagattcagggctttcttccatgagttccaccatgtcttgcagaatctcgtctgggtcaaggcggtagtcgttgtcgatttcttcgttatagtcgtcgatgaacacttcacgaccaactacggtcaatgtggaagtcatcatctatggtcaactcctttcatgagtggtaagcaaccgccgcagcgggcggcgcgcgtgaggagtggggcaatgagctatttcttgtcattgttgcttggcttctcctgtggcttgaccggtgcggtggcaatcacgagatccttggccttcatgtaccacgaagtttcgacgcggttgaagttcgcgtttgccacggtgtcgatcactgggtcaaccaaagtaacaatctggttgtacttaaagtctttgaccccagcttctgccggaattgaaacttggatcatcattccttgtttcatggacttcaagtcataggtgcgttccttcacgtcgtcggtacgattgccgtcttcgtcttgcacgaagcgttcgcggcgctggccggagaatttcaagacgccaaaggtttcttcaagatcgataacgatgccttctgctaatcgcatgtgagttcctcttttcttttatttggctgggacaatatcgtcggcattgcagatgtagcgcacaaaggcttgttcaccgatccggtagccgacggtcgcaatgcgcggcttgatgatggtgactggtgcatcaacttcaatgctttcggccttgtcacctttcttcgctggaatggtgatctcgatgttgtcggtacgctgcaagtcggagaacaactcgtaagtgcgggagacaaccttgcgattgtcgcgatcaccttctgacagttcgcgcttgagcgaaccgaagtacaggtggccgaacgtcttttcaatatttggtgcaacaaatttaagttccatgttgtagccttcctttcgtattcaaaaagccgggtagtggggctactcggctgtggcttggtgatagtattcggttagttgttgaagtaggtagtcgtaaaacgacttggaaattgggtgaaccgtgcgaccatcagcgtatcgtggaaactggatataccagcgatactgaccttcgatgagcttcacgtttttcaagatgagcacatgatccagtacgatgtcgccatggagcagtacgtcgccaccgggatcagggtacatattgatagaagaaatgcgcatgttacttgccgtctttcttcttggcaccaccgatcacaaccattgcagcgaggacgccgagcagcagcactacaccgatgacgatgagccagccggaggtcgcgttaccggtttgtgggaggccaggcttaggtgtctgcttgtcggtcatgacggccttcacgatttcgccatccttagtgatctcgaatggcacgagggcttcactaatttcgtagccctttggtgcgtcgtattcttggaagctgtacttgccagcaggcaaattgccgaaggagaagcccccgttcttgtcggtgcgaccagatacgaccgtcttgccgttttcgtccagaatgcggatgccggtgtttggcagccgcttcccagtagaaacgtcggtcttggtcagttcgcctgtgcctttgatcaagtcgttggtcagttcaaaggcaatcgcgggttccttggcgtcagatttggtctcgccgatctgcttgtctttgttattaaacactgtcacgccgtccttggtagatacgagcttgagggtttccttataaagaacaaggttagtagcagaaggcttggattcacggagatagaaggtgcccacaggcaagtgcttgatggagccagtggaatccttgcaaacggtgatggtctgaatgacctttttgtcagcgtcaagcagttcaaaaatcgcaccagcagcgttaccggtcatcgcgtaggagtagcccttacccgaaaccagcgtggcaacttcattgatcttcttgaatgacagttcgttttcgtggagcttgttgtcgatcaccttaccgtcattgaggtcgatgtgtttgatcttctcgttgtcggtggtgtggaaatggaagccgtacatggtggtgttcaagtcgtgcttctcaccggcgtcaagttccttgacatagtagtagccttctggcaactggatcgcaccaaattcagccttaccgtctttgaccgtcgtggtggcaacgagtgattcagaaggaatcacagtgtcgccgatcgtggtttcgccttgagtgaacaagccgaagacctgaccattggcagcgacgttcttgatttctgggaggttgtctttccaaccggcgatgctttcttcttgcttgttgagcgtgatgtcgagttgttgaaagtcgttcttggcttcaagtgaggtggaggtcaccgtcacttcttgcccggcatacttgagttcaaaagcgatcggctcagggttcatgatgaaaccatttggcgcagacaattcagtggcagtgtacttgccgaggtacagctctggggtctggatttggccttgagcgtcagtggtgccagtagcaaccacgtcacccttgtgggcacgaacggtgccgtcagcagtcgtaatatcttcggctgctttgaactcgaacttcgcaccagcgagggcggtgtaatcgtacttaaacttgtactgatcgccgtattcagtttcaaccttttcgacggcgactggggtagccccggtcttggtcaaggtggcgacacccttttgggagaggtcagcgaacttgatgaccacgatgccgtccttatggctaccgtcgatggtgaacttggctggttccttagccagtacatagctttctggggcttggacttcttcgagctggtacttgccgtagccaagcgcttcggcggtgatcagctcgccggagttgtcagtagcaaacttgtcagttgtaccagtcttgtcggcagttggctggacttcgtacttgttggtttgcaagttcttgatccggaaaatcgcgccagtgcgcagcacgggcttaccggtttcggtatcgaccttaacaacacgcagcttttcttcgataaccttgttttcgatgctgtaatgctgggacttttgggtaccgtcaaccgtgactgtgaacggcttgatgccgttatagccggttggagtcttggtttcagtgacggtgtaggtgtcgtaaggcaaatccgcgaacttcacgtaaccctgtgcatcggtgaggccagtgcgaacaaccttgccagtggtcttgctggtgacagtgaactgggtgccctttagcatgactggcttagtgcctttgccttgagttgcccagtcgtagttaccgtacttgagcaagtcgaggtcgccagtgatgacttgttccttgaccgtcgtggtagcggcggtagtggtcacgttctgcccagcgtatgccagcttgaagggatgcttttgcggatcaagcacgtagccagtcggtgccttcacttcttgccagtagtaatcgtccagttccaaaccggaaacagaagcgatgttgttggcaatcgtcaccgacttcacgagcttgtcatcggctgcacggtggagttcgtagacagcgcggttaaggctggcagcgccttgtggctgcttacccgtaacggtgtcaactttttcgatggtggcggtgccgcgttgttcttgatcagtcgtatcgacgtgagcagtagtgaccgcgacagtttgaccagcatacttcaattcaaacggcagcttggctgtattcagaacgtagccagcaggagctttttcttccagcgcgtagtagctaccaagcttgagattctgcaaggtgcctctgccgttaccgtcagtggtgattgcgccaacccgtgtgccggtgcttgtgtaaatgccgtagacagcaccattaagcgagtagtaggcattgaacatgtcgctaccgaactcacgcccaatcttggcgagggtcacgttaccgagctgttccttgttgccgaggacaacttcaacggtcttgccgggttcgatggtgacttccttgagttcacccttgttgacgtagccgttaggggcagtgacttcgctgatcttgatcttggtaccagctttgatcccattcagagcagcatagccgtcagtgccagttgtgacttcctttgtggtgccagcgtattcaaacttgagcttagcacccggtagcgccttgttggtgtcggcgtcaaccttcttggccttcacgttaccgttcaagttgaccttgattggcaggctaaactcaccgttgttggagagcttgaagttgacgagtttttgttgtgagcctttcgtgtagacgaaagaagtaccaacgtcagcggcctttgcaatcgcgtaagccaccttgccggattccttcgactgggcagtagccgtcagcgtgagcttgttgccggacttggtgatcttgaggttcgcggtgtttgccgtttgctgggcgaaagctgcgagccgtccgttggtgtcagtcaacgtgattgaatcaccaacggcgagcgtgatctgtttgccgttgaaagacggcttacgatcatgcgcggcgaccttatcgagaatcgctttcttttcagactgataggtcttgtttggtgtggtgagcaacgaatcgccgagcgtttcccaaataatcatctgggtcacggcgtagttgcgattggttggtttttggtagtagccgtagtaagcgatcttggctagttgatccttcttagcgtcggagtaggcgctggggttgtagccagagccgctcatatcgagatcgaccccgtgctccacacagaaggcaactttgccgtccacctttttcatccacataccggtgtccgtccaatgtaagccattgaacagatgcaggtgccaagtatttcgccagtcagcgaccttggtgttggtcatactggcggcgagagcgattgaggcggggacaaagagttggacgaatagcataatcaatgcggcgaaaattgaggttcgccgagctgctttcatcaatgtaatttcctccatatttagtgatttgttcttgattaaaacgaattttgaggacaaaaaaagcaggtctggttacaacctgctttacgttcatttgtgcgtttgctttgcgttaatcgtagctttacgaaatgcccattttgtaccaaattagggcgtcacgctcaaaactcgttgaaattccataaaagtgagtgaatagaaacgttgatataaagggactttgaaactcggtgaaaccgtataaaaccgaggaacgtaaagtacggtcttaagaaagctcgtaaagcttcacaattcagtaaacgttaatatcacttttatatcaatgtttacaagcacctcgcaattttatattgcggggtgtttttttgtttttgacaccatcggaatttttaagtgtaagcctaatgcgccatcccagcctattcccaatatttttgctatgcttagagtaattgaaggaggcttttttatgtatcgttatgccgttatttataatccccactctgggcacaacaatggtgagtcggttggtcagaaaattgagcaggcactcatcaagaatcaacacaaggtcgaactgatgccgacggaagggccgaaagatgcaacgcggttagctaaaaaagcggcgcgggcaggctttgatgtggtggtcgctgtcggcggggatgggaccattaatgaagtcgttagtggtcttgcgacgttagatcagccgccttatttaggcattgtacctgctgggaccgtgaataatttggcgcggatgttacaaatcccgttggacattgatcaagcgattgaaaatctgcagcaggttcatctgcgcccactcgacgtcggccaagtgaacgatgattacttgattagtacaatgacattgggcattttggcggacgccgcgttgaacgtgactcagagtgaaaaacaaaaatgggggccgctagcttttttaagcaaaggcatccatgcattagcggagcatcagcattatccgctaacgattgaaacgcctgatcggcactggcaaaaagacacgcaattcttgctggtgaccctcacgaattccgttggtggatttaccaacttcaatcccgaagcgcaacccgatgatggttatttccatgtcttcgttgcgccgaaaatgtcgctagcacggtcagtgatgtttctcccttatttcttaacgggtaattttaaaaagattcccgggatgacttactttaaagcgaatgaaatcagcatcacagtcgacaatcagcaaagtgcacaaacccgcattgatggtgatccgagtgccaagtcaccattggagatgcgactcttagaacataagttgcaagtgattacgcctaatccggatttataagactaggggtaggttagagtcatcggtaaaacaaaaaagaattcaaaattttctaacgaaaattccgaattcttttttaattattgcgttaattcagcttgtttggccgcaacgcgttcactaatcttcaggaatggccagtagattagaacgccaaggattaaagtgaagccttgaatcacaggggcgcgccaatcgccgccggttgctaaataggagttgagtaatggtggtgtggtccaaggtaccatgacgactactcgattcatccagccaattgcggtgaagaagtaggcaatactgatgccaagtcctggcattaggacaaatggaatgatgagcgcaaagttgaagacaattggataaccgaaaataacaggttcgttaatgttaaataaacttgggacgaatgatagctttgtaatatcacgactagcgcgtgattttgagaagagcaaggtcgcaatcaataaacaaatagtactaccggtaccaccaagcatcccaaatgtatcgcggaaaacgttgttgatgatataagggatgtgttgaccagctgcgtaagctgccatatttttgttcatgttgatcagtaagactggatccaataaagtaccgttaatgacagcttgatggatcccaaatgagaagaggagattaccagtcccgtaaatcaaaaggagacccggtaaacttgtattaacgcgccgaagtggttcttgaatcacatttgtaattaaagtgatgagatcagtgtggaaaccagccgttaaaatcgcagcaagtgccgcaaaaagactcattgtaatgaggtctggaatcattgtgttgaaggaaccagcaacagctgatgggacggcatcactcaagttaatctgtaattttttaagctttgaaagagtcataaagagttctgttgcgactaaaccaataataatgccggcaaacattccggttgttcccacgttttggaaagttaagaggccagaaacttcgacggcttttttggcagctagtggtgtgaccggaacagtattaggcatcatgatgattaaagtccctagtgccatgacagccgcggaaattttgttgacgtaattcttattacgcgctaaacagtagccgattgtaggtgtgagtaatagcccagcaacgttcaaagtcccattggtaatgtaagtgccgaagtattgaaagttggttagcatttggccgtggaggacccaggggaatacaacgttattcacgagcaccccaattccggcgaggatgaatagtggcataataatcgcgaaggcatcacgtaatgaacgcaaatgcacttgattcccgattttaaaggcgatatttgtaaactgatcaataaatctttgtcgccgacttccttgtttaagcatagaaaacactccttttaacgcactttttttagtctaattgttcaccgttagattgaatgaccttttgcagccaataaaaactagccttcggaattctagaaaggtctttgaggtcgtgattggttcgattgacataaacgacgccatagcgtttattcatatcaccttttgaacttggaatgtcgattaacccccaaccaagatagcccataacgtgagcgccgtcttcatcaactgcgtctttcaaagcctggatatggtcgcggtgataggcaatccgttcgtcatcttggatcacttcgtgattcagtgattcttcgcgaatgccaatcccgttttcgattggaaaaatggggagggcagtttcatttgaaagtttcgttaagacatttctaaaaccgagggcgtcaatctgccagccccattcgctactttctaaataaggattagggacactcgcatcgcgcatgtaataattgggtggtgtgttgggggttaattttgtgtgatcgagtgcgacagtgtagtagtaactgaacgctaagaagtcattatggtgactcgcgattaacgccaaatcgtttggctgaatgctactcattaagtcatgattttgcatatattgcagtacttcggctgaatagtgaccttttgtaaaggcgtcgacgaaatgttggttgataaattctgatgcttttctagcagcaaagacatcttgggggtgactggttgcaggatagaattcttgataggctaacatcccaccaatttggtcattagggtagtgggcgtgtaagtaattggcgatttcagcatgcgcaaccattgtattattagcgatcgtataaagggttaataagtcgcgctctccgttgataaagccagtattatcaaagccaggttcaaagaaaaaaccattttgttcattaaagcttagccaatatttgacttgtccaccataacggtcaatgacagccttagcgaacttagtgaatgcttgtgtgacataccgacttgagaaaccattatatttttcagctaatgagtgaggctttttttgttgcattgatttgaagttgttgacaaaaattcatatcaatggtttaatggtttaaacttatgaaccattaaaataaaaccggagattaatgtatggatgaaatgaaggttattaaacagagctttgctgagctgagcccgtttttgacggcgcttggggatgagaagcggcagagtattattttagaattgatggctgataaagcttgtgatggcttacaggtcacggatttaatggcggcgtcggacttgtcgcgcccggcagtgtcgcatcatttgaaagtgttgaaggaagccaacttggtcgactttagacgcgaaggcacgaagaactattattacttgcaacacgaactgggcgaaatcaatcaactaaaaacactgctggatcagattacggcagtcatcgaaaaacaacagtaaaaggagtttttaaaatgcaaaccatcttaggtagtagcggtcagattggccaagagttagccaaggcacttcataaggacttcacaacggacattcgactggtcagtcggaatccaaaaaagtgaacgcgaacgatcaactatttccagcaaacttgctcgacgccgcccaaactgatcgtacggttgcaggcagtgaaattgtttattttaccgctggcttaccgatgaattcagacatgtgggaagcgcaatttcacattatgatgactaacgtgattaacgcgtgcgtcgcgcacaaggccaagctcgtctttttcgataatacctatatgtatgcgaaaaatagcacgctccagacagaagcgagtccttttgaacccgttggccgcaaagcggttgtccgagcggagatcgcacagttgttacttgataagatggcaactggcgcaattgaagcggtcatttgtcgtgcacctgaattttatggcccaggcaagacgcaaagcattacgaacacaatggtctttaacaatatcaaggcgggcaaaaaggtgcgcgtgccattgaatgatcaagcggttcggacattaatttggacgccagatgctagtcgtgcgatggcgttgattggcaatacgctggatgcgtttggtcaaacgtggcacctcccttgtgatgacggtaaaacatacgccgaaatcatcgcgctagcaggcaccttaacgcatcaaccaatcgactacaccgttttaaaaatgtggcagttcaacatcggtagctggttcagcaaaccgctaaaggaattaaaagaactcctacctagatatgaagtagataatctgttcagttcagacaagtttaagaaacggttcccagaatttaaggtgacgacgattgaagaaggggttcaggagattctttaaaaagtcagcctttcgctcgatagactaaccattgttcaatattatataatcgctttaaagtagcgatgttagtcaatcagataaggagcgtggcatgatgaagaaaccttttaataagcaacaagtgaatggtgaaccaaatccggaatttgattccttctttgcggaagtcttaaagaagttgccgcaacaatcggcagctgtgattgcgaagtcttttaaccagtccaaagcattggcggaaaagacgatggcgaagagtcggacacagtttgatggggtctttgaagacttcctagtcggtgtggatgatcagatgcgtaaaaaggcacacaatatcattcacgcagcatcactaacagcagcgattattggctgttcaccaattccattttccgatgcgttcttgttggtgccggttcaattaacgatgatggcgcgtttgcataaactattcggtcaatcttggtcggctagtttgggtaagagcctgtcgaaagaattggtactcgttggcctaggtcggagtgcagtcggtaacattctaaaactggtaccggtcgttggaacggtcaccggatccgcggtcaatgcgaccgttgcgatgtcgattaccgaagcgctcggctggttaacggtcaagatgttgaacgacggcgaggacatcttcaatgatgttgtttcatttaaaaatcaattcagaacgctatttggattgttacggcgtaagtagttatttttcaattgacagaataagaacgaaatgatttaataaacccacatcactaatttttaggaggctaaccagatgcccaaagtactaattgtccacacgaatgttacgcgttatcaaggaaccaccgatccaaccggattatggctgggggaatccgcagagttcgttgatgaattgcaaaaagcggggattgattacgattttgtcagtcctaaaggcggcttcgtcccgcttgatccacgggggatgaagtacacggatgaatcaattctgaccatctatgaacaaccggattacgtgcaacgggggttagtcgcaacgctgaagccaagcgatatcaatccagctgattacgctgcgatttactatacgggcggccatggtgtgatgtgggattttcctgataatccagaattacaaacaattgcccgggaaatttataatcacggtggctatcttgcgtccgtttgtcacgggatcgcgggtttactacgcattaaaaatgatgacgggcagtatctgattgctggtaaaaaagtgactgggtttaccactgcagaagaaattattgcgggcaagaaaaaagtggtgccatttttaaatcaagaagtggcaacccaaaacggcgcgcaatttgtgcaaaaacggttttacaaaccatttgctgtccaggatggtcagttgattacggggcaaaacccgttttctgtacgagaagtgacgaagcgcttgattccgaccctacaaaataacggttaggcattctttgaattctatgctaatcttatagaatgtagaaaagttaggagtcagaagatgagtgaaaaacaaacaccaaaattaacgcaaaaagaaaaaatgcaagcactaattgatcagaaaaaaggtggcggcagatcaaaacagaccgacgttgctaaaaatgatcggacaaagatgcgcaaaggaccaaagatttttaacgaaatccactggtaaagagtgcgtttggttgcggttagcaactgagcattaagctaaaatccgcagtaatccaggttttaggagtactgcggattttagcttaagcggaagttgttgcaaccaaaaagcacgtttcaaacaaagtgcgtttgaaacggtttggttctgagcattaacctaaaaataagcactatggcggtccttgccatagtgcttattttgtagttaagcacaggagccagtttcaaaaagcacgtttttgggctagggcaattttgcgctagccctttttgtgttaacgcgctatgctagaagcaacttattttaaatcgaatggagtctttgtatgtcatctttaatcgaacaaatgcaacaccatgtttcagttcgtgatttcgagccaacacccctcagcacgacagtgaaacaacaactcattgcggcagctcaaagtgggtcttcttcgaatttcgttcaggcattttcaatcattgaagtgaccgatcccgtaattcgtgatgaaatcgcaacgatttctcaaagtgcggcgtatgttaaacagacggggacgttctatgtttttgtcgcggacttataccgacaagccacactcttagaaaaagcgggccagtcagtagctggcattcaaaatatggaagccttattagtcgcaacagtcgacacagccattgcagcagaggacatggcagtcgctgccgaatcgttagacttaggcatctgttatatcggtgggattcgcaatgacattgcgcgtgtcgctgaactactcgagttgcccgcctataccgtcccactatttgggttaacggtcgggattccgaagactaaaaatcaggttaaaccacgattgccgcaagttaatcaagtcgctcaaaatcaatatgatgtgcatcaggcaaccaacctagtgcaatacgatcaacaaatgcaaaattattatgctaatcgtgggaccaatcagcaacaaactgattggtcgaccaagaatacggccttctttagtgaagtgcgacgaccagcagtggcgagttttttgaaaaaacagggctttacgttgaattaagaaaaaatggtacttatcttaaaggacaatcagttttctgattgtcttttttttgtgtcgtgcaagctcggatatgcgataataaaactagtcaaatgtaaccggttaaataggtataggagtgatcgttatgagtttaattgatgtacgacatgtagccaagcggtatcagatgggcgagacaacaatcgtggccaatcatgatattagttttacagtcaatgaaggggagttagcggtgattctcggaccgagtggtgcgggaaaatcgacagtgctgaacatcttaggtgggatggatacacccgatgaagggcaagtgttgattgatggtgtcgatattgcgcagtttagtgcgcaccaattgacggcgtttcgccggactgatgtcgggtttgtgttccaattttacaatttagtgccgaatttaacgacgcaagaaaatgtggcgctggcaacggctgtctcgccgaatgccttagatgttgcgcttgttttgcaacaagttggtctgcaggatcggcttcagaattttccggcccaactatccggtggggagcaacaacgggtggcgattgcgcgggcacttgctaagaatccgaagctcctcttgtgtgatgaaccaactggcgcactcgattatgaaacgggtaagcagattcttaaattattacaagaagttagtcggcaacaacaccggaccgttgttttgattacgcacaatgccgcgattgcccagatggctgatcgcgtgatttacattaacgatgcgcgcgtgcgttcaattgaagtgaatcccaacccacttccagttgaaaagattgaatggtaggtggttaatatgcagacacgtttatatttacaaaccacattccgcgatattcggcaggcgattggacggttcattgcgattatcctgattattttaatgggtgtcttattgtttgtggggattaaatcgattggcccgaacttagaagagactgtggatcattttgtcaccacgcaacgcgtatccgatttacagattagtgggaccgctggcttaacggaacaggaccgtgcggtggtcgaaaaaatgcatggtgtccaagctgaattgggttatcggattccgtatcgcgatgaagcgcgggatgttaacttacaattatataattaccaaccaactgcacggcaaaatcgcttaacgctgactaccgggcgctatccgcaacgaacgaatgaaattttagtggataacgcggtcaagacgtattatcgtctggggcagagggtgacggttaagagtcagcagctattgacgcaccggtttaaagtggtcggttatgtggactcaccgctatatatcgaccgtcaggaacgtggaaccgtaccggtcggggatggtcagctagatggctttatgtatttgccacaaaaggcatttgcacctcaaccgtattcggtgatgatggtgcgctttagtgatttggatcgtcacagtagctttttacaggcttatcgcaccggcattgcgactaaagaaacacagctcatgcgccaattaaaagcacacacaactcagccgcagcaacagtacttactaactgcgcgcagtgctaatccgggttttaatgaatttacgagcttgtcggatcgcatcgatgcgatagggaatgtctttccggtcttctttttcttaatcgggattctaattacctttacaaccattacgcggatgatcgaagaaaatcgtaaggaaatcgggacattgaaggcactaggctatcgtaattgggaaattgcgcagaagtatttactatatgcgctactaacaggtagtatcggcaccgtgcttggcaccattttgggcacgaagttattaccgctagtcgtctatcgaatccaaaaaccggtctacacctttgcgcattatccaacccatttttggacagttccaattttattagccactggagcggtcttgattgcgacagttggggccacggggtatgttttaatccgcgatttacgcgagaagcccacccaattactccgaccaaaagcgccgaaaccaggccaacggatttggttagaaagaatcacaccgctctggcggcgattgagtttccatcaaaaagtaacttatcgtaatctttttcgctataaagcacggatgattctgaccatcttaggcatcgctgggtgtaccggtttaatggttgcaggctttggtttaaagacgtcaattggcgaagttgctgaccgtcagtttaagcaattgacccattaccaagcaattgtgacgcttaaaataccgaatagtacagcccaaacgaagtcgattttaacacagactgagaaggttcggtcttacttaccggtcacaatgacccaggttaagttcaagcaaaaagggattacggatcaagcggcgacagtctgtgcggtcgctgatcaagcaaaacttgcacagtacgtcgctttgcaaacaccgcgagaacaacaacgactcacattgccgaaacacggtgcgattattgctgcgaacctcgctaaaacatatgctgttcaaaaaggcgattggttaacgctacaaacggcacaggggaaacgtgctcgcattcaagttgcagggatcagtgaaaattatctcggtaatagtgtctatctccgccaatctgctctttcaaaaacgctacaacaaccagttgcggctaatgcctatctcgtgcgcaccgctaagatgactaccaagcaagaaaaacagttggcgacccgtttgcaacaaacaacggaagtggcggccacaacgtttatcagtgatcaaggggctaagcaagcaacggctagtgctaatttagacccaatcgtttttattttcatcgggttatcagcggttttagcgtttgtcgtcttattcaaccttactagcatcaacgtttcagagcgggaacgtgaattggcaacgattaaagtcctgggctttttcgacaaagaagtgacggcctatattgtgcgagaaaatgtaatcttcaccgttattgggattgtgcttggctttggaatcggtaaattgctgacttggttcatcatcacgatggcctcgtcagaacaagtggcctttccactcatcattccagctagcggctacctgattgcggcagggatgacggtgctattttcactgattgtgatggggatgacccatcgcaagttaaaagggattgatatgattggtgcattaaaggagaacgaataaaagttttagcaaataatgcttttttacttgcttgtgacgttacgtcatcggctagtatcaaggtatggaggtgatattctatggcgcaatatacaacaggtgaactcgctaaattatgtaatgtttcggtgcggacggtgcaatactacgatcaggcggatttgttgaagccggcaagcttaactgaaaatggacgacggctgtatggggatgcgcaagtgcagacgttaaaagtcattctaggctacaagcagctaggcttttcactgaaggcaattcaaaaagtgatggcgagtcaagcttcgacggatacactggcattgttagtcgaacaacaactcaatcagttagtccaaaaagaaacagacttagctaaccagaaagcagcgttgcagtttgtactgcaatcgattcaaaatactagcgcggtgccttttgaaatgacaatcagcgacatagaagacgcaatggctaaaacaacacagttaaaaagattacatcggcgaatgctgatgtggggcttattgattgatggtgtggaaattggcttattaattcttgggtttctaagtggcatttggtggccaatgtggattgggataccggtcatcattgcgatggccatttatgtgacaacattctactatcaagaaactgtctatctatgtcccaattgcaagacggtcttcaaaccacgcctaagtaaaatgttctttgcccggcacacgccaaagacaagacaactagtgtgtccaagctgtggacaaaaaaattactgcatagaacagagtgcgtaagcaggcgttcgtatttttaggattaactggatttgccgaattggcgacgcaatcgctaatttggcaaatttggttagccacagaaatatgcctgctgaagcacgtttaagaacagagtgcgtttggtcgcggttagcaaatgagcattaagacaaaatcaccagtaatccgtttttggagttactggtgattttagcttaagcggaagttgttgcgaccaaaaagcacgtttgaaccaggtgtgcgcatcaaacccaaaaccatctaagctgggacgatttcgtctcagtttttttgagtcagatactttataatagaagtattacaaaaataaggaatgatgcaaatggaaacgacagtgatcatctcgacgctctttcggttggcaaaagtcttcgatgacatgggtaagttattgttcaaagcgcatttagatgtgccgttgacgtttgaccgtgcgcaatcgcaggccttattacggcgcaataaccgactagaattcagctatcaacaacttaaaacaagtaaaacaaaactattaaatcaattattggcgacggcgggagccgatccctatttgtggaccaagttacggcgactgcaggcattggatgtggcgagtttggcagccgttcaagcaaatccgcaatttaaccgccaacgcaagattaatcgtttgaaacaactgattatcaatttacaaaatgaaaaaatcaatgagagtacggtactgacgaagcaggcgctcgcctatttataccatgtagcccctgataaagtggcggccacgagtaagccaggaccgatactggccgatccgtttgatagccgcgcttttaaaatggacatgatggcccttaattatttagatcagtattttaacgtgcaggaattgcaatattacgtgaagtacctcgtgtttattcacgcgcatcaagcggcggaagcggtgattcactatgacgcgcgaacggttttgccgaatgcggaacaaactggtttttcggcaattgcctattacgtcacgcttaatcgccaatcgtatacctacatttcctacaaggggactgaggggacgatggatgatccgcggattaagtcgtttacgcagcggctggataattatgtccgtgagagttatcaagattggaagtataatattgatgcgatgctaattggcaacaccgaaaatgatgagcaactccaactcgcacggcggtttacgcggtatgtggtccggcgggtgcgccgaattaatccggcaacaatcatctatggactgggtcactcactcggggggcattttgtgcagacggtccaattattggatgaaccgtttgatggtggctataccttgaatgctgccccggttcagttaaaacaaataaagcattatcggccggatcttttatccgcttcaaaatggcaacaattattcgcattgactaagcacaacaatacgcaagatccagctgtagcaatgcaagtccacgcgattttgggacataattacgctacaattgaaaatgaatggttcattaaagatttaacgcggatctattttggctttccgtatacgttctacattgggacggcgcgttatttgaatgctaaaaattggcattacccgtttgtgactgacgtagcaccatatctccgaaaagatgagattcaggcgtatagccagttctggggcaatctaattcgctatttgaaacgtgttgagactagaaatgggtcgttgatgttggcaagtctgatgacatatggactgcagacactccgtgaagtgtatgccgcgattaaaacggaacaggcccaacaaatttttgcggcatatgcgcgctatttatacgatgcgcacatttttaaagacacccccgttcaggtacagaccaattttgaacgggaattatcacggccgcgcacggcactccgtgtgttacaaggcgaatggccatttttgaaaagcgtcaacaatgagatggtcgaaacggtgattttcttccacacgattgaaggcgctcaatactttacacgctagacagatgggatgttaactaatggatatttatttgaaacaagcaattttacaagtggtcgaccgcgaactcggcgatccaatttactcacaacaggtgctagatcttaccaatgggaatacacgcgactatttaaccaacaagattaagaaattatcgtctgcccagagtaagaccggcgtgctgcgccaagatgctgagctcgcatcttttctgcgcgatgcgacagctgattttatcggcgctagccaacgcctcgttgaaaaatggtacacggtctatcaaaaaagtgacgatgcaccgagtgcggatgcgtttgttgtcttgtatgaacaagatgcgcaagcttacttggcttttttgaaggtcgattatcatcaagccttcacccattatgtcaatgctgaagagggaccattgatgaatcaactgattattcaccaatcgattctatcgaataaaacgcaaaaggcggacgaagggtttgcgattaacctccagacgtttggctttgaattgatggagaagaagtacaccttctccggtgaaaagatgacctacttatcaacgaacgtgattgaaagcgaaccagcgccatcgctagaagaaaacgtcaaggttgttaaaaaagccgctgaaaaaatcggcaagaaattcgaagttgccaaacacgatgtggtcgccaacgtcaaagaagcgatctacgacacgattgaaaccaatggagaaatcgatacgagccagatggcggcgaagatttttaaagacaacgtttcagcccaaagtgagtttaaagcagaaatgacggaaaacgcgccagcagcaccagcgccaatctcaccagccgtccgcgaaatcgccgaaaagaaatacggcaaacaaaaactcaaactctcaaacggcatcgaactaatcgtcccaatcgacgtctaccaaaacccaaatctatttgaattcatcaaccacccagacggcacaatgtcggtggagattaagaatgtagaagaagtgattagtagattatagagtgcgtagacaagcggttatattttgagcattaactggatttgcccaattggcgatgtaatcgccgattgggtgaatttggttaagtacagaaatatgcttgccgaagcacgtttagagtgcgtttgaagcgggtcgactttgaggattaacctaaaaatgtgacttatgacgggtttggtcataagtcacattttgtagttaaccggaaaagccagtttcgaaaagcacaccaaaaaagagcatttctctcatcctatcgagaagaacgctcttttactatgcctttctttttgcccagattaaacggataatcttatcgaattccgtgatgattagaatcaagaagcctgcgccgatcgaaacgccccattctaataaggtaagcggttcggtgtagaaggtttgttgcatgaatggcacgtaggtcaggatcaattggagaataatcatcagtgcgataatgccgaatgccttttggttggtgaagaaagcttttgaaaaggcgagtttcgcagtccgaatattgaacaagtagaaaatcttgctgatgacaatgatattgaccatcattgtgctggctgtgacttgatcgacaccgcggccgagtaaccaatcgtaggctaacaagccgattaaggccatcaagacggaaacatatgccatttggaaaacatcgtgtttattcatcagcgcttggccggtcttacgtggcttgcgggtcattaagccatcttcagctggttcgaagatgaaggcgaattgaatcgtaatcgccgagaccatgttaatccagagtaactgcgtcgcttgcaacggcatatcttgttgcatcaaaatcgtgaaggcgatgattaagccttccgcgaaggaagtcgggagtaagaagagaatactctttttgatgttatcgtaaatccggcggccttcacgaattgcgacggacattgttgcgaagttatcgttggttaaaatcatatccgcggaatctttggcaacatcggttcctttaattcccatggcaaccccgatgtcagcgcgcttcaatgcgggcgcatcattgacaccgtcaccggtcattgcggtgactttgcgactggcttgtaaggcttcgacaatttcgagtttgttatgtggtgtggtgcgggcaaagacttggtgttctaaagcggcttttggtttttcagcgtccgacaagcgatcccattccggcccggtaatcgcattaatcgttggtgctaagcctaacttttcaccaattgctttagccgtcagtggatggtcaccggtaatcatcttgacatcgaccccagcagcgttcatttcggcgagcgcttggatgacttcatcgcgtggcggatcgataatcccggcaacccctaagagttgaatcccttgttggagttgttcatgggtaattgtagcagtcgttgttggcacgtcgagataaccgaccgccacaacccgtttgccttgttctgataaacgggtcacatcggcattccagtcatcgattgggaaatcgaccattgcctgttgggccattgggaataatttatctggagaccctttgatatagattcggtgcgtaccatcagttagttgcacgagtttagcaatgtagcggtaatccgaatcgaaaggtaacatgtcaatttctgtatttgttggtaagtcgtcgataccatgaaccttatgatataaggttaaaaaggcaccgtcagttggttcaccgttaatggtccaaccattgtcggcttgataaagcgtcgtatcgttggcttcataactagcctctaagaattgtgtgagggtggtatccaattcagcaggttggtcatttaataaaatctgaccttcgggcgtatagccattcccgctgacttggtaagtcgtttcggcggtaataatttcggtcacggtcatttcgtttttagttagcgtccccgttttgtcggtcgcaatcacgtcgacggagcccaacgtttcaacggcaggtaagctcttgacgatggcgtgtttgtgcttggccatgtcgctgacccccattgcgaggattacggacattgttgcgggtaatccttcaggaattgaaccgaccaccatcgtgacaatcgcgattgctaatactgagagtgagtaatgttcgccaagtaagccgaagaggaataaaaagacggccgcaccgatgacgacaaatgaaacgccggtccctaagccgttgatttcgcgagtcaatggggttgggcgggttttcgtttcggtgacagcaactgagatttgcccgatttcggtatcagcggcggttgcgacgaccacgcctaagccgctcccgttagtgacggaagtggaggcaaaggccatgttgacttgatcggcaagggcaacttcttcttcggttaagcgtgttgcaattttttcaactgagtctgcttccccggttaaggctgattcttgaatacgcagattatcggcatcaacgattcgtaaatccgctggtacactatcgccagcttctaggaagataacgtcgccgaccactaagtcttcagttgggatgtcgatccgctgaccgtcacgataaacggttgcttcggttgccaacatttctttgattcgttccaaagcatcagatgcgttcgcttcttgataataaccaatgatggcattaatgatgactactagaccgatgatgatggcatccgaatagtgacccatcatgagtgttaatagggctgcgacgattaggatgtagatgattaagttgttgaattggcgcacgaaaagttgccacttcggggtgtgatggctctcgagtttattcggaccattggttgctaagcggttaaccgcttctgtttgcgaaagcccctgttcaaaatcttggtgggcataattggtttgcagttcgtctaatgtttgttgataagcgtgtgttttagtcatggtaagctccttttaattatcgaaagtcaaaatgcggtcgttcgtgatcgttattcttgccgataataaggaataatctgatggattaaacaaaacgcttcgcccgagccgtcatccaaaaatactcacctccagttagttattactctaaaattatcatgaaaaaatagcgatgtcaatctaatgaatactattaccaattcaacgtctaaactttgcgcccagtgtggctttgtggtaatattattacataagttaaaaaaacggttgaagcattgcgcgttcaagatttccttctttagggtggtagaagggaattttggcgtgctttttttatggagggaaatgaatcaatggcaactttagcaattattttaataagtactttattggcaggacacatgagcaaacggattggaatgccggctgtgattgggcaactcctggtagggattattcttggacccgcgttgttcggtgtcttacatgaaaattcttttatccacacgttttccgaaatcggtgtcgtgttattgatgttcatcgctggcttggagagtaacctgaccttgttgaagaagtatttcaaaccaagtttagtggtcgccgtcttaggggtgattgtcccggtgatcagtatgtatgggatgagcttggcctttggtattagtcaacttgagagtttattcatcggggtgatttttgcagccacctcagtatcgatttcagtcgaagttttacgtgaattaaacgtgttagaaagtaaagaagggacgattatactaggtgctgcggtagtggatgacttactggccgtaattatcttgagtgtcttgaccagtctttttggggcgcaactggctgcagctagttcaacccacatgagtttggggttgagtttattgctgcaagctttattcatggttgcggtctactttagtgtgaaatggattgtgccatttgttatgcatttgagtcgtcgtttgttagtaccatatgcgagcgccattacatcgttaatcatttgttttggatttgtttggttcgctgaggccgttgaattgagtgcggtagtgggcgcgtttttcgcagggattgcgatttcgcaaaccccgtataagaaagaaattaatcgccatattgaaccgatcgggtataccgtgtttattccggtattctttgtcagcatcggtttatcgatgaacttagcaagcttgaatcaacatattctatttattacgattttaaccgtgttagctgttttctcgaagttaattggaagtggtctcggtgcgcgttggatgaataattcgccacaaggagcctatacaattggtgcggcaatgatttcgcggggcgagatggcgttaattatcgcgcagattgggtacaacgctaaattgttgagtgaactttattactcagagattattttcgtgattatcattaccactgttttggcaccgctgattcttaaacacgcggtgaaacgccaattagcaactgaaatcaattaagaaaaatcgtcagctatttgctggcgattttttttgcccttttttaaagttgacaaaaaaaggattgagcagtactcttatcaagttaagaaaaacatgtatttaattacatgatatggaggtttttaaaatgacaaaacaatttaaagaattagaagatttcttagggacgcatttcatttacacttacgataatggttgggagtatgaatggtatgcaaagaacgaccacacagttgactaccgaattcatggtgggatggttgcaggtcgttgggttcgtgatcaagaagccaacatcgttaagttaacggacggcgtcttcaagattacttggacagaaccaactgggactgatgttgcgttggacttcatgccaaacgaaaacaagttacacggcatgattttcttccctaaatgggttgaagaacatccagaaatcacagtgacctaccaaaatgatcacattgcactcatggaagaatcacgtgaaaaatatgaaacatatcctaagatgttagtgcctgaatttgccacaatcacttatatgggtgatgcaggacaaaataacgaagacgtaattagcgaagcgccttatgaaggtatgattgaagatattcaagaaggccggtatttcgatgctgactatcgcaagattcaaaaataggcaatctgcttaaccaatcacaagcatctactaattatgacgataagtaaatagttgattttataaagcagtttcgttataatgaggtcatggttaaataaattaacgaggtgaactggacatggcgattcaagtaggtgatttagttcgcggccaatcaaacgaaattatgtctgcgacgtatatcggtaaggtcattgagaaatgtgaagaaactgtgcatatcttaatcttgaactatgcaccaactgatcgttttacggttcacgagttgatgcaacgaattctagtgaattcacaacaacttcgtacaatttcgttaacgaaataactccctaatacccatagatttctccctataaaaaaacgaccactcccaagaaaaggtcgttttttttatgcgcaaaaagcggtctaatcacaaaggtggcgcttgcatcttgttgctcgctcacttatagtgaaagataagtgatggcaggaggaatgtgcagtggttgaaaaaagaaagttaattgaaacagatcaaccagcattttatgaattagcacaatatgcgtttaataaaccggatagtgctaagcgccaagaattcttcaaacagttgtatacacatagtgcagggtttggcgtttttgatgacggccggttggcaagtggcttattagcgacgccgtttgacgtacggctcaatgggcaaacctttaagatgagtggcattggttatgtcgcgagttaccccgagtttgcgggcaaaggtgggattgcagcattgatgcaactcgcgtttgaacacatgcgtgcagaaggtgtgacgctttcgtatctcgcgccattttcatacggcttctatcgtcggtttggctatgaacaaacttttgatcagacgcactttgagattcaaacggctgacttaccacgattgaaatttgcaccgagtgcaggacaagtagtacggatgacattggcgcaagcggtgccgttgattgatgcgttcttcaatcagcatccggacaatcaagtcggtggtgtgcagcggactgattggtggtggcaatatgatgttatgaagcatagtgattgggaagtggcggtctatcgagaagatacaggacgggtcgcggggtatatgatttatacgcgccaaccagagacgtttgtgattcaagaactgatgacctcgacagttgcaagtcaagaacagctattgagctttattcttaagcatcagtcagcttatgcgataattcagtatgagagtgcactgactgagtcgctagctgatttattgcctgatcccacaatcgtaaagacgacaaccgtcccttatatgatggcacggattgtgtcactagctgatttcttcgcgcgttatgcctatcaagtagcggaactatctgcggtaacgattgcggttcaagatgatttcttacctgaaaatgccggtttatggcagttaagtattcatgcaggacaagctgctgtgacaaaattagcaacggggaccgcagacatcaccgttacgattcaaaatctaactaaggcgatgttggggtatcgcacacttgagagtcaagcacactttgggcatgtgcaagggacaccgcagcaaatcgctcaactcagtgctgcgtttagtcatacgaaaccgatgttatgggattatttctaaattgaacatcaaaaaaagccaatcatccaggtaatatctgaatggttggctttttttaattaagcaggttggacaatctgcacgttggcatttaagacaccggcagaggggatgtcacaatttggcattgcgacgtctaattgttgtgagttagaagcggcgaaggttccggtatcgttgacaacacggtaccatacttcaccggtacttaatgtgatcttgatttgtgagccgcgggggataacgcccaagtgcgcagcgactccggcgtacattccaccgggcatacttgttgcgccaaggaccgcgggatcgtaaaaggttaatttgaatgtccctttgtcaattaaggttggttcggcaggtgctggggccgcaactagttctggctcaggggcgggcgttggttccttaatttctgcggaatcaggatctggatgaatcggacagctaacgggtttgtctgttggtagaacagttgcgtgtttgaccagtgacatttcagctgcttgggcaggttgccccgtgaattgttcaatggcttcagatgacatcagcttttggacagggtggttcgtttctggtgctgcttcattggttaatgcggcacgcgcgatattcgttgtaattagcatcagcaatataaggccgatagctaacaagaatggtttgtttttgataataaagcgtcactcctaggtaagttttggaactaggagagtatatcaatgctgcatgtcaattaaatagcagtttctttacagaaatggggtaatttgtcatgttagtcatatgtttgtaaaatttagggacttaattaaagggcgtcacgatggcgttgatcggcagtaagacgcgaatgggaatgctatcatgacgattactgttaaaatgacaaaaaacagggcaactatcgtaaagatagttgccctgtttttaagaattagatgagaaaatagccgaatacccctaaaatgattaagaataagaagttcatgccagtgaaaacgacaaggaacttaccaaggtctttgccccagcctttcttaaatcgtttgtaagcaatcaagtttgcaagtgaggcaaacattgtgccgaccccaccgatattgatggctaagaacattgcgtggctgtggttagtgaagcttgaaagtaaaatttcagttgggacatttgcaatcaattgacaactgataatcccggtgatgtaagtttgttttgctgttccgacaattgatcgcatgaatgtggcaatcgttgggatgtgacttaaattcccaacagcgatgaagaaacagaagaatgtgagtaataagccgtaatcgactgttttgaataacttaggatcaaacgctagaatcgcgataatcactagaattggtgtcacccataatggaattaatgagaacactgcgaggaaaacgacaaccgttaatggaacgaaataccacagtggccctttttcaacttcaacgggatgtaacccgtgaagtttgatgggttcttttggaaagaggaaggtcgttgctgccaacataatgacgctgacaatcaagacgggaattgaatattcgaagaaatggcgaatcgtcatatggtaaaacgaaacaaggaaaatattatgcgggctcccaaacggtgttaatgaagaaccgaggttagccgaaatcgtgatgagcgtcaccggtaagattggtgaaaattcaagttgacgcgcaattaagatgaataacgggacgaacgttaataccgtcatatcgttggttaagaacatcgcgccgacaaacgttagtgctaataacatctgcatcaaggctcgtttggaacggcttttgataattaattcgcgagcgaagtaatcaagcacgtggagccgttgataaacttgaacgagcgtcataatacaaaagacgctgacgatcacgtggaaattaacgtaactaagttgtgggcggttgaaaaatgaggtgacaatggctgcgatggcagcggctaagagtagtttgtcatctaagaaaaaatctcggatgttcaaagcaatgtttttcatatagattcaattatccttcttaatatagttatattattcaaaaaagcactactacaattctagactgtttacggggataaaaacagaaaaatttacaatatatacacaatttttacaatacatagcctcccattctagtaaacgcggttgactgtctcgcttgacgttagcggtttttaatttgaagaattaagtgattttactgcttatcgcggctaaaattaggtataatataaatgaaatgtaaacgattaatcattattaagaaggtggagcagatgaaagacgccccaagacatacaatcatattaggaatagtggccacggtcattgcgtttatttgtggcatgttagttttaaagacgattttgaatttcaatttatggcttgcgattctaatcagtgcagtactaggcttatatgtcgggtttaatgcattctatagtacgtatttagcagaaatgatcaaaattgaagtggctaaccaaggattaacaagccaagacttagcgacaatgatgcatggtagggctaaggattatccaattgtccgcggtgaattgcgtctaatcatttctcggcgcaaacgcgcacagctgttagcgaagttgcgtgcacgggttagctaaggcttttgcatgaacgattgttctatgttaggataggactaacttattgaagggtgcgattacatgttaattgaacgaccattaattatgaagcttcgctctgtatatttgaagatgacgcatcgtgcagagcctaatattgattaaaagtcatctataggacattactggatttaacgactggtgacagtggtttatttgggtagtgactatggatggagtggtcgatagtcaatgattgtaatcatgacaggggtagcggatgctgcccctgttttttatttggaaagaaagtaggaataaaacaatgagtattttaaaagtcgaaggcctaacacaacagtttttagataaacaactttatgacgacgccgggtttcaagtgaataaaggcgaacatatggggattaccggccaaaacggggtgggtaagagtacgttaatcaatatcctcacgggcgtcattcttccggatgaagggaaagtgacgtggcaaaagaatcttaagattggttatctcgatcagtatgcgaagttagcaccaggattatcgatctttgaatttttgaagacggcttttgcggatttatataagaaagaaaaattaatgagtcaatattatgcggactacgcagagagccttgatgaccaattgctcgaaaaagcgggtgcgattcaagaactattagaggcaaaaagcttctatgatattgatacacgcgttatgcaagtcgccactggcttggggattgatgcattagggatggatcatgatgtatcacaactaagtggggggcaacgttcgaagattattttagcgaaactactattagaagaacccgatatgttattactggatgaaccaacgaactatttggacacgaaccacattgattggctgagtgattatctcaatcatttcgaaggcgcctttatcacaatctcccatgattatgactttttggaacgggtgacaacctgtatcgccgatatcgaattcggtaagattacgaagtataccggcacactacaacaagccttccggcaaaaggaagagaataaggctagttatttaaaggcctatgagaaccaacaaaagaagattgaaaaaacgaaagcttatatccgcaagtataaagcgggctcccgttcgacaattgccaagagtcgtgagaaacaattggcacatatggatattttgacgccaccaagtaatcgcgtgaaggctaacttccgctttccatatcatgcaacggccagtcagattctattgacgactaatgatttggagattggttacgatcgcgcgttactaccagcgttgaacttttcaattggtcgtgatcagaaggtggtcttgaaaggttttaatgggattgggaaatcaacgttgattaaaacgatcattaaagaaattccagcaatcgatggggactttgagattgccagtacggtgaagtttggttactttaaacaagacttgaagtggccgaataatatggtaacgccattacagtatctacaaggcgaataccctgatcagaaacaaaaggaactacgccaagttttatcgcggactggtttaactgccgaagaagcgatgaagcctttgaaacaacttagtggtggcgaacaatcgaaggtgaagattgccgaactactattaacatcaagcaactttcttctattagatgaaccaacgaaccatttagatgatgatacgaagaatgcactacgaaaagcaatccaagccttcgagggtggcgtactccttgttactcatgaagaagacttctatcaaggtgactggattgataagattttgaatgttgaatcactcattaaacaatagggataccgtagagctttgaagggttattggtaacgatgaaacgttgctggtaacttttcaaagcttttttaataaaaagcttgaccgcgcctgttaatcttggtaatatataaaagttgtctcgacgagggacgtatggttgatgactcagcgatacgaaataaaaaagattttaaaaaacgcttgttatttaaatcttatcgtgataatatattatatgttgcttacggagctataacttctaagtaataattaattaaaaatagttgttgacagacgatgagttgtgtgatatacttaaaaagctgtttcaacacagtagatctttgaaaactgaacaaagtttcgacaaaccaaatgtgtagggtcgcccttcggggcacaaaacatatttgcaaagtcaatttcgctagcaaataaattaagtaacaaaacaagagctacaaacttttaatcgagagtttgatcctggctcaggacgaacgctggcggcgtgcctaatacatgcaagtcgaacgcactctcgttagattgaagaagcttgcttctgattgataacatttgagtgagtggcggacgggtgagtaacacgtgggtaacctgccctaaagtgggggataacatttggaaacagatgctaataccgcataaaacctagcaccgcatggtgcaaggttgaaagatggtttcggctatcactttaggatggacccgcggtgcattagttagttggtgaggtaaaggctcaccaagaccgtgatgcatagccgacctgagagggtaatcggccacactgggactgagacacggcccagactcctacgggaggcagcagtagggaatcttccacaatggacgaaagtctgatggagcaacgccgcgtgagtgaagaaggttttcggatcgtaaaactctgttattggagaagaacgtatttgatagtaactgatcaggtagtgacggtatccaaccagaaagccacggctaactacgtgccagcagccgcggtaatacgtaggtggcaagcgttgtccggatttattgggcgtaaagcgagcgcaggcggtttcttaagtctgatgtgaaagccttcggctcaaccgaagaagtgcatcggaaactgggaaacttgagtgcagaagaggacagtggaactccatgtgtagcggtgaaatgcgtagatatatggaagaacaccagtggcgaaggcggctgtctggtctgtaactgacgctgaggctcgaaagcatgggtagcaaacaggattagataccctggtagtccatgccgtaaacgatgagtgctaggtgttggagggtttccgcccttcagtgccgcagctaacgcattaagcactccgcctggggagtacgaccgcaaggttgaaactcaaaggaattgacgggggcccgcacaagcggtggagcatgtggtttaattcgaagcaacgcgaagaaccttaccaggtcttgacatcctttgaccactctagagatagagctttcccttcggggacaaagtgacaggtggtgcatggttgtcgtcagctcgtgtcgtgagatgttgggttaagtcccgcaacgagcgcaacccttattactagttgccagcatttagttgggcactctagtgagactgccggtgacaaaccggaggaaggtggggacgacgtcaaatcatcatgccccttatgacctgggctacacacgtgctacaatggatggtacaacgagtcgcgagaccgcgaggtttagctaatctcttaaaaccattctcagttcggattgtaggctgcaactcgcctacatgaagccggaatcgctagtaatcgcggatcagcatgccgcggtgaatacgttcccgggccttgtacacaccgcccgtcacaccatgagagtttgtaacacccaaagccggtgaggtaaccttcgggagccagccgtctaaggtgggacagatgattagggtgaagtcgtaacaaggtagccgtaggagaacctgcggctggatcacctcctttctaaggaataatacggaaaaccttgtacatttgcgaagtcgaaactttgtttagttttgagaggtctactctcaaactttgttctttgaaaactggataataagtaatatattagttttaaaagccgagaaaacattgcgttttaaagagttttttaatagaaatatgaattagttcatatcgctaaactcaaataataaccctttaccgtaggtaaagttaggttaagttataaagggcgcacggtggatgccttggcactaggagccgatgaaggacggtactaacaccgatatgcttcggggagctgtaagtaagctttgatccggagatttccgaatgggggaacccaatacctttagtcgggtattatcattaagtgaatacatagcttaatgaaggtagacgcggggaactgaaacatctaagtacctgcaggaagagaaagaaaaatcgattccctaagtagcggcgagcgaacggggaagagcccaaaccaagaagcttgcttcttggggttgtaggacagaacattggagttaccaagttaagttgtaatcgaatcagctgggaagctgagtcaaagagtgtgataaccacgtagattaaacaacttaacctccgttctggatcctgagtacggcggaacacgtgaaattccgtcggaatccgggaggaccatctcccaaggctaaatactccctagtgaccgatagtgaaccagtaccgtgagggaaaggtgaaaagcaccccggaaggggagtgaaatagatcctgaaaccgtgtgcctacaattagtcaaagctcgttaatgagtgatggcgtgccttttgtagaatgaaccggcgagttacgtttatatgcgaggttaaagtgaaaagctggagccgtagcgaaagcgagtctgaaatgggcgagtgagtatatagatgtagacccgaaaccaagtgacctacccatgtccaggttgaaggtgtggtaaaacacactggaggaccgaacccacgtcagttgaaaatggcggggatgaggtgtgggtagcggtgaaattccaatcgaacttggagatagctggttctctccgaaatagctttagggctagcctcggaatattggatcatggaggtagagcactgtttggactaggggcccgtcatgggttactgaattcagataaactccgaataccattgatttagttccgggagtcagactgcgagtgataagatccgtagtcgaaagggaaacagcccagatcaccagttaaggtcccaaaatttatgttaagtggaaaaggatgtggcggtgcacagacaactaggatgttggctcagaagcagccaccatttaaagagtgcgtaatagctcactagtcgagtgccgctgcgccgaaaatgtaccggggctaaacataataccgaaactgtgggtggacacgtaagtgtccgcggtaggagagcgttctaagggcgatgaagctagatcgtaaggactagtggagcgcttagaagtgagaatgccggcatgagtagcgaaagatcagtgagaatctgatccaccgtatgactaaggtttcctggggaaggctcgtcctcccagggttagtcgggacctaaggcgaggccgaaaggcgtagtcgatggccaacaggttgagattcctgtactagtttattttgtttgaacgatggagggacgcaggaagctaaggaatgcacacgactggaaatgtgtgtctaagcaacaagtcttgagttgagtgaaatgcttgattctttaaggacaagttgtgatggggagcgaaattaagtagcgaagttcctgatgttacactgccaagaaaagcttctagtgagaaataaactacccgtaccgtaaaccgacacaggtggtcgaggagaatatcctaaggtgagcgagtgaactctcgttaaggaactcggcaaaatgaccccgtaacttcgggagaaggggtgctgaccgtcaggtcagccgcagtgaataggcccaaacaactgtttatcaaaaacacaggtctctgcaaaatcgaaagatgacgtataggggctgacgcctgcccggtgctggaaggttaagaggatgagttagcgtaagcgaagcccagaattgaagccccagtaaacggcggccgtaactataacggtcctaaggtagcgaaattccttgtcgggtaagttccgacccgcacgaaaggcgtaatgatttgggcactgtctcaacgagagactcggtgaaattataatacccgtgaagatgcgggttacccgcgacaggacggaaagaccccatggagctttactgtagcttgatattgagtgtttgtacagtttgtacaggataggtaggagccgtagaaatcggaacgctagtttcgatggaggcgttggtgggatactaccctaactgtatgaccactctaacccgcgccacttagcgtggcgggagacagtgtcaggtgggcagtttgactggggcggtcgcctcctaaagtgtaacggaggcgctcaaaggttctctcagaatggttggaaatcattcgtagagtgtaaaggtataagagagcttgactgtgagattgacaaatcgagcagggacgaaagtcggacttagtgatccggtggttccgtatggaagggccatcgctcaacggataaaagctaccctggggataacaggcttatctcccccaagagtccacatcgacggggaggtttggcacctcgatgtcggctcatcgcatcctggggctgtagtcggtcccaagggttgggctgttcgcccattaaagcggtacgcgagctgggttcagaacgtcgtgagacagttcggtccctatccgtcgcgggcgcaggaaatttgagaggagctgtccttagtacgagaggaccgggatggacatacctctggtgtaccagttgtgccgccaggcgcatcgctgggtagctatgtatggacgggataaacgctgaaagcatctaagtgtgaagcccccctcgagatgagatttcccattcctttatggaagtaagacccctgaaagatgatcaggtagataggctaggagtggaagtacagcgatgtatggagcggactagtactaatcggtcgaggacttaaccaaaggtgcaatgttaggcttttgaaatgaaatattacttattatgcagttttgagagaacgaagttcttctcagtgcgcaagcacaaaatagtgtggtggcgatagcaagaaggatacacctgttcccatgtcgaacacagaagttaagcttcttagcgccgatagtagttggtgggaaactacctgcgaggataggacgttgccgcgcaaatataaaaaggttgagccgaaaggttcaaccttttttgtagtaattaaataataagttgggagaaatcagcatgattcaaaccgtaacagaacagaacatcgcaagctttgttcaaacacaaccgttagtgattttagacttttgggcggattggtgtgcaccttgtcggattatgacaccgatgattactgaactacatgaacaattagctgatcagtttggcttaggaaccgttgatgtagaggatcaagcagcgttagctgaacaatatgcgattcaatccgttccaaccctattaatcttcaaaaatggtcaggcgacagaaaaggtaactggcgcttttccaaaagagaagttaaaaagatacttagataagaaaatcgctgaaatgtaatcagcgcattaatagtagcccgcaactttcattggagagttgcgggtcttttttgataagtagaaataaaataacccccttagctattgtctaagggggagatgattattgacgaaccatgtggataacacgttgataaaggattaatgcgccaatctcacaaagtaaaatcaaaacagctaatggaagataggtataactgcccatcacgccaactaatggggaaagaaaaatgccgaaaacatacataccaagtccaagcactgaagaagcaatccctgcatgttgtccttggcgttgtaaggccagtgaggtgacaacggcattaattagaccaagtgttgcgaccactaggaataaaccaattaaagctaaccagagacgattagagccaaagccactaattaagacgcagatggcaccgattaaaccaccaattaagccgatttttaattgttgtaattcatcaaaccaatggattaaaatggtggacatttcagccattaagataatcccaatcccattgattccgtagattagactgaaagttgatttagaaagactaaagacattttgaagcatgaaactggaacctgaaatataacagaacattgccccataaacgaggccttgaattaaaacaaataggatgaatgggcgatctttaaaaatggcttgaataccaaggcgcgattgttgtgccgattgcgcgcttgtggatactgtgtgtgtttctttgaatcccaaaatgatgcctaacaatagaagaaggccaacaatccctaaaaagccgaaaatgccttcccaagaggtgaaacggagcaaagcacttcctattaatggtgaaatgatggggaagataccgttgattgccatgagtaaggcaatgaattttgtcaattgtttaccgtcaaataaatctttagcgactgctcgagtaatgacctgtcctgcagagctcgctaacccttgaataaaccgtaaaaggaagaatagccaaatattgtgggtgactaacgataatagacacgctgtaaaagcaagggcggttccgattacgagtggctttttacggccaacacgatcgctccaggcacccatgaagatggggccaatcgcaagtccagccaaacacatggttagactcagttgaatcatggaagcagatgaatgaaaatcagcttccataatcggaaatgctggtagatacatatccactagtaggggtccataagcactcagtgaaccaagtaaaacagataaccatagtgttcttttttttgttaaaaccatgttaataaaccctcctaaataaaaaagtgtaaaaaaatagcccgttgaaaacgtagctagcgccgaacgaatttaattaattactattcatgttgcttcttagttacactaacataagaagtcgggtttgtggcgatatatgagcaatttttaatatgtaaatggtttctatttcagtttaaacaagttatgatggagataatgaaaaaagttgtcgaatgaggttttgccatgaaaattgcccaaaaaaataaaatattagaaacctgcctaattgcgggacggattatgattgaaagtggttctgaaatgtaccgggttgaagatacaatgaaccggattgcttataatgcaggcattcaaaagagtgttgtgtttacgacaccgaccggtttatttatcggaattgaaaatcaaccttatgtgcaactaggcgctgttgcggtgcggacgattaaccttgaaaaagttgaaaatgtgaatactgcttcacggcaatttgcgactaaggaaattacgttggatcagttaatgttacagttaaaacaaattgatcaggatacagctcattttccgttgtggttacaaattacagctgcagcagtcatttcagcgtttttgatgattattttttctggtgaatatgattggttagatatcataccgtcagcggtagccggtgctttaggctatgccgcctttgcggcggtcaatcgggtcacaacgattcgctttatcggtgaatttttaagtgcgacagtgattgggatagtcgcctatctattaactaggtggcacttaggagtcgatatcgataatattatcatcggggctgtaatgccattggtacctggtgtagcgattaccaactcgattcgagatttgctagcagggcatttattatctggtatggcacgtgggatggaggccatcctgagtgcctttgcaattggaacagggattgcgctcgtatttagattctttatgtaaagagaggttcatcagatgccatattgggttcagtttattattcaagcgttatttagttatatttcaacggttgcgtttggaatttgtattaatttaccaagacgcgcattattatggtgtggctttgccggtatggcagggtggcaggtctattggatgctctttaactttggtagcgggcggatgcttgctaatttgttgggtgcgttagctgttggaatttgtggcaatattatggcccgttataagcggatgccggtgattatctttaatattccagggttagtaccattagtgcccggtggaactgcgtaccgtgcgattcggaacctcgtgctaggcaacttaaatgaagcttcgacacaaggtgtttcagtgatcatgattgctggtgcgattgccgttggctttatgttagcacaaattttagccgatataacacgcaaacgagcgattacgccgaaatgggtatcgcgtcactaaaaagtatgctataataagtctatgcgatgagtcgagtaagtctcggtaggcaactattctgcgaaggcagctaggagacccaaagatacaggataccacggttattcatttaaccacttgccgtattgcaagggtgttttcgcccgctgtgttgtggagcacaaggtgtttattcttcggaatactgtaaaaaaagccccttccgtcaggaaggggcttttttttgtgcgttcattttcttgcatgacagcgttactgatggtgcgatggtcgactaattcaccaatccgttttagatgtttgagatgtgcatcgtagtgttccgaaaaaacgggcgcgtataaaacatttaataggaagatgatggaggtattaatggtaaagttgccgattttcgagtagagtttttcgcgggttgtaatcggtaaaaagcaagtgcattcttgcgaaagtcgattttcaccgatactggtaatcgcaatcgtcgggatgttgcgggcgcgtaaaatagtgttaagtgctagtaagttgggattctcgccagaataggaaattaaaatcgcacaagcatccggactaagattataggcatcgtagttttcctcgccacgaaccgcagatagcgtaacgtttttttggatacgattcattttgagggcaaaatcttgcgcgatgagtaagtttgagttttgggagaagatttgaatatgatttgccttgaggagcaatgatttagcttgactcagatggtcgtggtcgagtaaaaagaagatatcatcaatcgtcattttgtccaagaccgccattttcttacaaatagtcatcaaactatccgtactcgaaaagggcagattgggatcgatacgcgtaaaatgtttattgaggtagcgccactcttctagatagtgtttcttaaaagatttccaaccgtcaaaatggagttttttggcaatgcggaccagagtggacggttgcgtataggtttgagcagcaatttcttggatggaaagctgatcgagtgcttctggagccgttaacaagtaatccacaaccacggtttcagcgggggaaaacgcgaatgtctctagtttttctttaattaacatgtaaccgcctccttttacaaaagattagcgatatggtagattgtaaaattaatccgaacgctgttcggacaaaaaagatcagcttcctttaaaatggtgtttaccacaaacccatcttttaggagctgatcttttgtctagtataacctattccgaacgaattaaaatcgaaaccttttgtgaactagggctgtccaatatccaaatgggcgttcggctgaaccgatcaccgtcaacaatttcttatgaattatctcgatgtcaaccttatcaggctgaattagcacaaacagatgccgaatacaagcgatcacgatgtggtcggaaaactaagctgagcgatgagttaaagcaaaaaattctcaaccatttacgtctaagctggtcaccaggaatgattgctcacgaatttaaactagctactaaatctatttataattggttaaatcaggggagaattggtttctccttgaatgatctacctgaacatggcgtacgccaacggcgtaacgttgaccaacgatccaaatataatcaatctttggggcgatcaattgaacagcgtcccatgatgattaatcaacgtaagcgcatcggcgattttgaactagatacagtcgttggtcctcgtgggcatagtaaggcagttttattaactttaatcgatcgcaaatcacggttcctttgggcataccggttaaaagatcggacgacagcgactgttaatgaagcactaactaagttcctaaccacttttaatggtccggtgcacagctttactgtggaccgtggcactgagtttagtgggctagtatcacttgaatcacaatatggtattaagacctattactgccatgtttatacgccagctgaacgtggtagtaatgaacgctttaatcggaatttacgttatttttatcctaaagggactcgttttgagcacattagtgctcaagatttaacgacgacgttactccaaattaaccagcgaccgcttaaaatactcgactggcaaacaccgtatcaggttatgctgacaaatttgtccaaaaattcggattaaatttgcaatctaccttacaatcgttggatcgattttcttagttttagccaacttgcctgttaagagttgggccgattggatggtttcaactggtttgaccccatattggaacgttgcctataacgcatcgtttgcaattatggcgttaatcgccgttgcggggattgcttattcttgggttcaggatgaaggttttgatccgttcccagcctcattacttgctattgtttgtttcttattagtgacgcgcccaagcactgccattgtttcggcatccggtaagattgttgtctctgttaaaatgatgagtcaacaaaccgggtttattgatcggacttggcttggtggacaagggatgattactgccattattgtcggtttattagtcggttggatttactcagctttcttaaaacatgatattcggattaaattaccagaacaagtgcctgcgaacgttgcaggttcctttaccgctttgattccagctgctgttttaattagtggctcactcttggtttatatcttcttcgacaaggttgcaaactcaaccttaacagaatcaatttacaataccattcaagcaccacttcaaggaattaccgattcatttggtggcatgttagccatttctttcttagtaccattcttgtggttcttcggggtgcatggttcaacaattgttggtgggattatggggcctttattgcaagccaactcactggctaaccaaaaaatcttggattcaggcaaagcattaacgttagctaacggtggtcacattgtgacgcaacaattacttgatcaatttatgacagtgaccggtgctgggatgacaattgggattgttgtttacatggcattctttgccaaatcagcacaattcaaagatttagggaaattatcattagcaccagcagtctttaatatcaatgaaccgattttgttcgccacaccaatcgtgatgaacccgattatgatggtgccattcttcgtgacaccaatgctatcagcaatcttaacgtggactgcgattcgggtcggtttaatcccaatgttccccggaacgttggtaccatggacgacaccaccaatcatttctggtttattagtcggtgggtggaagaccgcattgtggcaagccttaatgttactcatgacgttctttacgtacttaccatttattcggaaacaagatcatttaaactatgcttcagaacaaggtgcaacaactaaatagggggaaaggtcaacatgggacaacttagaaaagattttttatggggcggcgcagtggctgctcatcaattggaaggcgcttggcaagcggatggcaaagggattagtgttgccgatgtgatgactgccggggatgttaatcatcaacgggggattacagatggtgtacaaccggggcacaattatccgaaccacgaaggcattgatttctatcatcgttatccagaagatattaagttatttgccgaaatggggttcaagagctttagaacatccattgcatggacgcggatttttccgaatggggatgaagcacaacccaacgaagccggccttaaattctatgatgacctatttgacgaatgtctcaaatatcatattcaaccagttgtaacgctctcgcattttgaaatgccatatcacttggtcacggaatacggtggttggcgtaatcgcaaagtcatcgactttttcttgaactttgctgaaacggtcttcaaacggtatcgtaataaagtgaagtactggatgacgttcaatgaaattaataatcaagccaattaccacagccagtttgccttatttacaaattctgggttacagattcaacctggtgaagatgctgaaaaagtgatgtatcaagccgcccactacgaattagtcgcgagtgcaaaagctgtacaaattggcaagcaaatcaatcctgatttcgaaatcggctgcatgattgcgatgtgtcccatctatccactgacagctaaaccagaggatgtgctcaaggcagaacgcgcaatgcaaacccgttattggtttgctgacgtacactgtcatgggcgctatccagaatggctcttacaatatcaaaagaaccaacactacgatttggacattaccgcagatgatttgaaagaattggctgcagggacagttgattacatcggcttcagttactacatgtcatttgcaaccaaggacaaaggtgaaacaacgcttcattatgatgaagaatacgatttagtacctaatccatatgtcaaggcatcggaatggggctggcaagttgatccagttggcctacgttatgtaatgaattggttcaatgatcactatcacttaccagaatttatcgtggaaaatgggtttggtgctgttgatcacgttgaagcagacggccaaattcacgatccttatcggattgattatttacgcgaccacattgttcagatgaaaaaagccgtggaagatgacggtgttgatttgatgggctatactccatggggctgtattgatttagtttcagcaggcaccggacaaatgtcgaagcggtatgggtttatctatgttgataaaaatgacgacggaacggggacgttagctcgttctaagaaggactctttctattggttccaaaaggtaatcgccaccaatggggatgacctagcataatcatgaatagcgacgcaggcaaattgattttgtctgcgcctttttttgttgaaagaagcccatgcattattaataacccatttttctgaaataaaactgttattttatcgtgagttaacactaggcaattaccattatgaaataaattatgagaattagggcttatctaatgcaaaaataatcactatcgtttacaataagtaagtattaaaaatggaatggggtaaagaaatgacaattacatatgtcgtcatcaacatcgtgatcatgcttatcatgttatttgttttaaacaagatggcccggattcacgttaagtttagtcgccgcgttttcacggcattgggggtcgggattttattcggtgcactcttacagattatcttcaaagcagattcaacggttgtcaaacaaacagctgattggatcggcattgtcggcaacggttatgtctcgttcttaaagatgatcgttatgccgttagtcatggtttcgattattcaagccattacgaacttggaatcatctaagggcttagggaagatggccggcatggtcattggaatcttaatctttacaaccttaatcgcagccacagttggttcagtgacagcggatgttttcggcttaaatgcgagtgatattcaatcaggccaagtcgaaaaggcccgctcgaaagaattacaaacgaagctaggcgatgtacaggaacaaactgttcctgaaaaaatcgttagcttcattcctgaaaatccattcatggatatgacgggttcacgacctacatcaacattagctgttgtgattttctcagctttcttaggggtggcagcattacaattacggcgtaaaaagccggaacaagcagaaatgtttaataaaatcgttaacgccttgtacgcggttatcatgcgcatggtaaccttaattttacggatgacaccttatggggtgttagccttaatgacaacgaccgtagcacaaactaatgttaaaggaattctcagtctaggcgagttcgtgattgcctcttacgtggcattaatcatcatgttcttgattcacttcctattaattgcgttcacggggttaaatccaatcaactacattaaaaaagtgattccaacgttaatctttgcgttcacgtcacggacgagtgcgggttcaattccaatgaacattgaaacccaaacgaaacgtttaggggttgaagatgggattgctaatttatcggcttcatttggggcttcaatcggtcaaaacggctgtgcgggtgtttatccagcaatgttagctgtgatgattgcaccaactgttgggattaatccttggagcatcggtttcttggttaaattaatcttgattgttgcaatcagttcctttggggttgctggtgtcggtggtggcgcaacatttgccgctttaatcgtactttcttcaatgaacttaccagtcgggttagccggactattaatctcagttgaaccattaatcgatatgggtcggacagccttgaacgttgatggctcaatgactgctggggtcttaacggctcacttattaggtaaattggataagaacaagtttaatgatatgagtttgacggaagattcagacgaaatggcttaatttcaaaaaatggagggtttagtgatgcgaacgattattatcggtgccacagctgccggaacaagtgcagctgcgaaagcaaaaagaacgaatccagatttagacattacgttatacgaaaaacgggactatgtgtcctttggggcttgtggcttgccttattttgttggcgagcactttgaagatcccaaccaaatgattgcccggacacctgaaaaatttgctcaacaaggtattgatattgcgcttgaacacgaagtactatcagttgactttgatgcgcaaacaatcgtggttcgggatttgaaaaccaatcaagatcgcacagaatcttatgatcaattaatgttagcaacgggagccacagctgtgatgccaccgattaaaaatgttgatctcaaaaacgtctatcatctacggacgatggcagatggacaagccttacgtgaattaggacaagatccaaaggttcaatctgtaacggtgattggtgcgggctttatcgggttagaaattgccgaagagttccatcaattagggaagcaagtccgggtcattcaactagaagaccgaattttaccactggcttttgatccagaactaacggacatgttcgcggatgacttacgtgataacggcattgaattacacttatcagaagctgttcaagccttagaaggaactgttcaggtgactggcattgtgactgataaggggcagtatgcgacagacttagtgattgtagcagctgggattcggcctaatacgcaattcatcacggatgatcgattgaagaagttgccaaatggtgcgattattgtcgatcaagcagggcggacatcgattgaaaatgtctatgccgctggcgataatgcaacggtcattaacagcgtgacgaaccaaccgatgtattcagcacttgccactggtgccaataaattaggccgaattgtcggcacgaatttaggcgggcaagccgctcaattaccagggatgttgaattcagccggtgtgaaattaatcacgctagaagcgggccgaacaggtttgactgaaaaagaagcggcagaggctggtattgatttcagtactgttttaatccacgacaagaaccaaacgaattattatccaggccaatcagatttaacgattaaattgatttacaccaaagcagagcatatcttaattggtggccaggtggttggtcaaaaagacgcagtgttacgcgttgatgtactcgcaactgcgatccaagcgaagatgacaactgaacaactcgggttactcgaccttgtttatgcaccaccgtttgcaagaacgtgggatgcactgaatgtggccggcaatgttgcccattaattaaaaaaaaagtgacaccgcacaaaccgtgtagtggcgctttttttgttgcatgcttaaacagttgttcatagtgtttacttgaatgtttactcgggtctgtgctaaaattgcacttagaaattaaatttttgcaaagttagttatgaattaattacgatgattaagaaaacacaaataaaaaatttatcgacaggagacagtttaatgaacaacacaaagagtttgattgcattgagttctggaattttaggggcagctgggatcggtttattgagtgcagggcaagtacaagcagcaacgacagcaaccgtcaactacgcagatggtgcaacaactgtttggacaagtccaacaactggtcaaactgctaaacgatacatctttaagggccaatcagtaaatcttttagcatcacaaaagattggcgctgaaacatggtaccgaattggaaacggcgaatgggtacctgaacgttacttaacaaccagtgacgctacaccagctgaaacaacaccagcaacagaagcacctgctgctcaaaagacagctcggattgcctatgccggtggcgcaacaactgtttggtcaacagcaacttatacagccccaacaggccaatacttaggttatggtcaaaccgtcaacgttgtgaaaacagaaactgtttctggcgaagaatggtatcaacttgaaaatggtagctgggtaccagctcgctttacaggtgatggtaagattgaagccacaccaacgcccgttgcacaaccggtagcaccagcacaacctgcaacagcgactcctgtcgaaacaccagctgcgccagcaccagttgcaacaacaccagcgcaaacagaaagcacgcctacaacaccagcacctgtcgcagaaagtgaatcaacaccagttgaaacgcctgccacactagaaagtacaccagctgtagcagaaagtagtgcgcctgctcaagcagaaagtacaactcaaacacaacaaccagctactcaagaatcatcagctcctgtccaagaaactgcaccagttgcaacaacaccagccccaactcaaaaggcaccagttgaaacaacaccagccccaactcaaaaggcaccagttgtaacgacaccaacaccagccccaacggcacctgcagcaacgactggtaatgcgcaagctgttattaatttagcgatggctcaaattggtaaaccttacgtttggggtgcccatggtccaagtagttttgactgttctggattaatggactatgtcttcagaaatgctgctggtaagagtatcggtggttggacagtccctcaagaaagtgccggttatgctgtttcattaagcaacttgcaacctggcgatttattattctggggttcacaaggtagctcacaccacgttgcgctatacattggtggcggaaaatatattcatgccccacaacctggcgaaaacgttaagatcggttcaatgcaatactatgcaccaagttttgcacgccgtgtcttttaatgattgcaattaagcgaacatctcacctaggtgggatgttttttgtattttagccctaaataagctatgatatgtagagatttaaaaaaggactgacgagatgaagatagaagtacaagcatttatcaatcaaattcaagatcaaacatatttaacggatgaatacgagctccccacgccagatccttttgtggcggacggtattttggcacagttaaaactcgctattgataaagccattgaaaaacaagctttggcctctttttcggtgctgacagaatatgctggcgaacccgttaaggtgacattggaaacggggattgtgaatctaccattacaatacattaaaaaagtaaatcaattttttgaactcgacgaccaagcagaggtgaatctttatttatatgtgacatcgccactcattaatcgctcgaacatgcggattgacttaattgggacggtagcttcgtttgaagaatcggcagctgctaattggacgaagattgccgacttgctaacaaaggacttggaagccgtcgtaatcggttcacaggcgcctaaagaagaaccagtcgaaaagaaggcgcccgctaagaagaaagccgcacctaagaaaatggcaacgactaagaaaaaagcgcctgccaagaagacaacagctaaaaagacagctacccaaaaaacaacgactaagaaaacaaccaccaaaaaaaagactacgaaaaaagcagactaatttagtctgcttttttgatggcgtctattaaaggcaagtcgccgttaacaaacgagaatttcttgtggattgtttcggtcggatgttctaagacggtgcaaatcatcgcagcgacatcagcacgtgcaacttgcccaccagatggttgcattgtcactaggccggtagcttcgtcgtttgtaagtgtcccaggacgcaagatggtccaatctaaaccagagaattcaagccagtgatcggcatagtattttgcagcgtagtacggtttaatactttcaggccatttagttcgatcctcaacaaagagtgcactgaccatgacgtagcgactaacttcagcaatcttagctgctgccatactcttaacggcgccatcgagatcaaccaacagtgtttgatcatcgcctgttttaccgccagaaccagctgtaaagacaatcgcatcatgatcggcaaatagtggtgctaaagccttaggttgtttggttaaatcgaataagacaggcgtggcccctagttgtgcaagttcatccgcctgttgttcgacacgaatgccggctgtaacggtgcaaccggcagcaacgagttggctaattaggagctggccaacgttaccatgggcgccaataacaaaaatccgcatagtaaaacctccaatataaatgtgtgtgctgtccattatagtagttattgaacagtgacgcaaagatagtggatttaaaaacctgtgttgtagtacaataaaattcggcaccttgcgaaaaaatgagtgtgctttagggtatataatcttgaaagtggctgatggcaacctttaaataggcaaagctaattgtgggattcgttttagaaataaatctaagaatcctctcattttttcacaaagttgcttattagaatatcatgaagccgtgtttgttttgtgttatggtacagatatagagattgtgatttattggataagtagtcctatttgttaatgctatctcagaaagtaggaggagaacatgacaaatcaatatcggagcgtttttgatatcattggaccgattatgattggtccttcaagttcacatactgctggcgcagttgccattggacatgttgctaatcgtctttttcatgcaccgattaacaaagttattgtgcgttactacgaatcttttgcacaaacccaccaagggcatggtaccgattatgcaattattagtggcgtgctaggattcgatccggctgatcaaagggtaccaatggcagttgatttagcgcgacgtcaaggtattgacgttgtcttcattgaagatccagggaatagtccggtgcaccatcccaatacagcggaattaacgttaatcaatcgtgagaaggaactaacgatttggggctgttcaattgggggcgggaccatcgaaatccgccaagtcaatttgaatggcattgtgattaaaacggatggcccgttaccattggtttttgtcgaatcggaacaagaaatcggcgatgctttagaccagatatttgaaggtaactatcgtgataagcgcatatcggttaaagtgccagatcggtttttgtataaaatcgaactgattgataagccgtacccggaacagattgaacaggtccgcggaatgagccaagacgttattgtgttatagaaagtggtgggaagatgtatacaacaattcacgaattagttgaaacagcgcaagaacggcaactaccaatctcggaattgattatcgaacaagaggttgcgatgagtcacactagtcgtgaggtcatttgggcaaccatggggaaaaacttggatgtcatgattgcggccgaagaaaaaggcgtgaccggtgaaggtgttcagtctgccactgggattacaggcggtgaagcggttctgttgaagcggtatcgggaaaagggaaagtcgttatcaggtgatgtgatgttgaccgctatgcaaaatgcagtggctaccaatgaagtcaatgcttcaatggggatcatttgtgcaacgccaactgctggttcagcaggtactttacccggtgttttatctgttattactgagcgcttggcgcttgatcgggatgcgcagattcggttcttgttttgtgcgtcagcctttgggatgattgttgccaataaggcgatgattgccggggcaactggaggctgccaagccgaagtggggagtgctgccgcgatgggcgccgccgctgcagttgaagctgctggtggcacaccacaacaatcgtcggaagcattcgcgatggcgatgtctaatctattgggattggtttgtgatcccgttgctggattagttgagataccatgtgttaaacgaaacgtgattggggccgtcgatgccttgaccagtgctgatatggcattggcagggctaatcagcaagattccagctgatgaagtgattggtgccatgaaacgaatcggtgaagatatgccatctacattacgtgaaactggtttaggtggattagctgctacaccaaccggggttgcattgaagatgcaaatctttggtaaggataagagccttaaataaaagcgacttttaggaggagcaatcatgcaaaagaaactttcaaaatccgcatacggcggtgtttcaggtgagaaatatgtaccgtatgtcaatcaaggcgacaaaaaggtcggcaacttagcgattctaataatggggagcattttagccattatttttgctgcttcaacagcttattctgggatgaaggccggtttaaccgttgcagccgggattccaggttcaattattgggtctgggttagtcggcgcctttgccaaatcaaaagggattttaggcaagaatattatgcaagggatgtccagtggtggtgaatcaatcgccagtgggatgatttatgttttaccagctattattttaattggtggccacatcaacttcattcaagggatcatcgttggggtgctcgcaattcttttttcaatggggacagcctcattagtgcacaactacttaatggttgaagaacatggtaagttggtttatccagaagccatggcgatttcagaaaccttagttgcgtcagatactggtggcgattcgcttaaatacatgggcgttggctttggtatcggtggggttattacgatgctaacttcatcagtgtttggtgtcgtcaacaacatgattagctacgttggttcatcattttataaatggaaattggacgttgaagtgaatccattacttgcaggaattggttttatcgttggattagaagtgtcattaacaatgtttgcgggtgcgattttatccaactttgcgattgcaccgttaatcggttatttcacagatatggcgggcaacagtgcgcatgtttggaataacacgagtttagccgtgaatcaaatggccgttaacgatttatcaagttcatacgttaaatacattggtgccggaatgatgctttgtggtggtttaatcggtgcgattaaattaatcccaactatcgtgacatcaatcaagaaaacactagctgctaaaaacgtagcaggcgaagaaaagaatacacttggtatgattgccattgttgttggtggtgttgggatcttcgttattggtattatcattgcgcaaaacttcttaatggggattgttggtgcattactagcagccatcttaagtttactctttgtcattgtttcagcccgggttgctgggacgattggttgttctaacttgcctgtatcagggatgacaattgcgtcattagtgattatgacggtagtcttcgtattatttggttggacggacaataaccatacgcaaatcttattgatgttcgggacattcgttgtgaccgccgttgctgttggtggtggctacatgcaatctcaaaaagtaacatatgtcattggtggttcaaaatctgaaatgatgaaatatttcatgattgccgggattgtcggcgtaatcgtaactgtcggcacaatcagcatcttatcaccacaattcgttacagatagtgcaacaccagcctttgggttaccacaagcgaacttaattgctacattaacatctgggattatgacgggtaaattaccatggatcatgattatcgttggggttatgatggcattagctttctactttttagatttaccaatcatgaccgttgcaattggtttttacttaccaatttcaaccacttcaatcatcttgatcggtgctttgattaaagtctttattgaaaaagcaacgcgtgatgaagcgattaagaataatcgggttcaaagtgggattagtttatcatccggtttaattgctggtggttcaattattggtttaatcgggattattctccacgtaaccggtgtgttaaaagatcgcgtgattactggttttgcgaataccaatgcaatggggattatcttattggttgtcatggttgtttcgattactgtgccacttatgatgattcataaaggaggggcaacagaagatgggacgacagaaagcggagattgatttagaacaactcatctatgaaaaaaatccgcaagttcagtttaagttacaagctggccaggtcaccattattcggccgcagaatcactggattcaacggacattacggcgtttgcatgtgaagattccgctagaaacacagctggaacttgatgattatggtagttttgtctttaggcatgtgaatggaaaacgcagtgtccaccagattggccaagcactggcaggacagtatgatgaagccggtgaatacctgtatgaacgattactcgtgtatttgaatcatctagaacacacagaacatttgatccggcgggtaaccgactaagttttattaatcaattagtgaatcacatttttaataaaaaggagtttttcaaatgacagacagaatcgaattatcagcatgtacttcaatgatggtagggaagaatgcgtcaattgatggctctacgatgatttcgcgaaatgaggatcgcttctatgcaatccatcctaaacggttcttcgtacaaccagcagttcatgatcgacatgagacatatgtttcaaaatataacggcttaaccatgccgttaccgacggacggttatcgttacacatcaacccccaacggcgatttaagtgatggtttaaatgaagaagacgggattaatgaaaaaaatgtcgccctctccgcaactgaaagtgtttatgccaacgaacgggtattagcttatgatccgttggtcaagcaaggtttagctgaagattcaatgtgtacgttggttctgccatacatcgattctgcacgtcaaggggttcaattgatgggggatttgattgctaaatacggttcagctgaaggcaatggcgttcaatacagtgatcaaaatgaagtttggtatcaagaaattgttactgggcatcactgggttgctgttcggattccggatgattgttatgcagttgccgctaaccaaattgccatcgaagatgtcgactttaatgatccagaaaattacatgtggtcagaaggtattcaagaattcgtcagtgaaaatcacttgaatccgagtgaagctgaatggaacttccgtaagatttttgggacggatactgaattagatcgtcactataacacaccacgggtttggtatgcacaacgctatttgaaccctgaaatcaaacaagaacctgaatcgagtgacttgcctttcattcgcaaggctaaccgtaaaataagtgtggaggatgttcaatatgtgttaaaatcacattataacgaaactatttacgatccacttggtaatgggacagaagaacaaaagacgatttatcggtcaatttcactttcacggacgcaaaactcacatatctgtcagattagaaacaatgtgccagatgctgtgcgtggtgttcaatggttaggtttgggggtaccaacattctgtccacacgtaccattctttacgaatgcgatggatacggatgaaagttatcgcgaactaccagcgaagatgcagttgaagaacgcttactggttatatgaagcattagcaatgattgttgaatcacactacggggcctttaagaaagctgatattgactaccaaaaagcattatcagaatgggcaagaactaagattgctacggtggatgctgctgtaaaggcggaagcgaatgccactgatttcttaacccagcaaaatcatgaaattgctgcacattaccatgaagcaacaaccgatttgttagcgcaattggtgacagaaggaacgcaactttctaagttgaccttcgtcatggataagaacctatagccaagtgcgcactttaatcatttgtcacactcttccaaggggggagtgtggcttttttaatcgatggaggtgctacagtgattgctttaaaaggaaattcgaaaaaaattattatcgcgatggtatacggttttttggcggcggtgagtgttaatctgttcttgattccggcgaagacgtattcgagtggggtcacggggattgcccaattactaacctcgttagtcagctatatgggcggctcattaagtgttgcgatgttggtctttattttgaatgtgccattattgattctggcatggttcaagattaatcatcagtacgcgatttttagtatcgtcgctgtttttacgagtgtccttttcttgaaggtcattccagtacctgttcacccaattgtcaccgaacgatttgcaggtgccttgttcgggggtgcattgattggtttaggggttggcttgtgttttaaagcgggtttttcaactggtggcacggacgtcattgtgacgttagttgggcgcttaactggcaaacgggttggtgttgtgaataatatcatcaacggaatgatcattcttgcagcgggcatcttctttggttggggtgctgccttatacagtatcgtcgaaatctttgtttcaagcttgttgatggattatatctatattcaacaacaaaaggtgactgtgacgatttttaccaagcgacctgaagaattgaagaagcgaatgcgtgactttattcatggtgcgactgaattagatggaactggtctgtataccaaccaagaaacaacagtgatcatgacagttgtttcaaaatacgatctaacggaattaaaacgggtcgttaaggatgccgatccgaatgcctttgttaatattcaatccacaatgaacttgtggggtaaatttgaaaacgtcgaataatagtagctatcctctggaactaaaaaacggtcctttcaacaacgctaagttgtgaaaggaccgttttttttatgtggtttggcggagttgaccgtcttcgatacgccaaacgtgatcgacgagatctaaaacccgttcgtcatgtgttaccatgacagctgcgcgtttttgttcatgaactgcatcgcgaattaagtggacaatttcacgaccacgttgcgcatctaaactggcggttggttcgtctgctaaaatgagtgcaggttgattgataagtgcccgagcaatggcaacccgctgcttttcaccaccagaaagcatagcgggataactatgtaatcgatggcctaatccaagttgtgtcagtaattgttcagcggcggattgatcgcgacgacgggcgattttttgtaaaaaagtcagctgctgagtgaccgttagatagggaattaattctgaactctgaaaaataaaaccaattgattcgcggcggatttgtgtttgacgattacgattgagtgttgcaagttcttgaccggccaaggtaacacgaccggctgtgggttgcaagagcgcgcccataatcgtcaacaaagtacttttaccaacaccgctgggaccaacgatggcgctaaattcacctggctgaatcgtgaaggagatatcttttaaaatgtgattaatttgatcaccatcgggataatctttggtgatgtgttcgagtgttaaaatcggtgctgacatattaatgacctccaatagctgtgatcgggtcaatccgaatcacttgaataagggataatagggcgcttaggatggcgacggctaaaaatagaacgctggtgccgatgatcgttggtgctgtgagcataaacggcatgctggcaggcattgactgggcgatgacactaatgataccgccagccaaaagaatcgccactgccgttaacaagccaatctcagagatgatgtgctggctgagatagcgtgtggttgtgcccaatgcttttaaggccccaaagtcccgtaatttctgtagggtaatgatataaaagaaaattgcgaggacaaacagtgagatgacgtataaaaagccgatcatcaagtacaatgaactttgttctgcagagtagccagggatgttatcaatcaaggtttgtttgctgatcacttggtagtgcttgttaaccgacaagggccgtttgctagcaaacgcgttataggtcgtcttttgcgttggaaaaatggtttgccactggtggtggtttaaataaataacaggcgtatgggcataagccatctgcttgctaaagccgccgattttaaattgctgaccagtggtactgtctttaaaggtgtcgcctaattggtaaccattggcttgtaacttgctgctgaccaccactttttgggtggcttggttggacagcttttgaccttgggtgactttgggtgtcatgaagctcgtagcgtcaactgcaatgtaggcaatgtcagtttttgtttgttttttaggccgctcgatggtggcttgggtgacgttgatgggtgtcagtgattggtgtttgagagcttgccaatcagattgggtgagtgccgagcgactcaaccgactttccgaaccggcttgtaaaacaaaatgcgtcgccggcgtatttttaatagccgcgccactatcgtttgctaaaccggcagctagtccggtgatgaagagtactaggaaaacgattaaaaagatgataaaactcagtgcgccaaattttaacttattatggcgtaattcttggattgttagaaacatatgccgacctccgatgacttgttattaaggctactataacgatggttagttgattcaacaataatcaatctaagtgtttctgtgttataatgcacacaagttagtcaattgtgatgtaaatggaggctgaaagatggttaatctgcaagacagacgggttaaacggacacataagttaattcgcacaagttttattgagctcctgctaaaacacccaattaatgagattacaattcagatgattgccgaccgggctgatattaatcggcggacgttttatttgcattatacggatatctacgatcttttaagccagacagaagattttaccttaaatgagttcagccagttgctagaacgttttgagttgccttctgaaccacagattgttggccaaactttctttagatgggtcttgtcatatgtgcaagacaacgagtctatgttacgggtattgtgtcgtaatcccgattcacagttaatgaataaattagttgcgttgaccgtgactcacggcaagcgggtgattccatttcagcagccggaaaacgctgattatattttgaattattgttgttggggtctaatcggtgttttgcacactgcattgtttaaaccagcgtttgacgcccagcaattggcgctcgttgctgaacagttattgaatgcttctttacaagtcagcgaaattaaagcatagaaaaaagcccaccggtaaataaatgtcggtgggcttttttctattttattttgctttagcagcttttaattgcttgaggttaacaacgatcttgttgtttaattccgaaacgttggccttgtcggctgcatcgaaatccgtaatgctaattaaagcggagttttcatatactttttcaacagttcctgtaaatgcaccatctaggtcttcgttcactttgccggttactaaatcaccgatattgagattttctttatccatagccaaaaactccttcagacattattaaaattaccaaataaggtgataataaactatgtcatggtaaatagcaagacttactgctataaattaatcgtttgattgtgaatgaaacgaaattggctatttaattccccatctaaatacgctaaaacgaagaagtgttaccggttacaaatcaaaattgaggggaattcatatggaaccttacttagttttttcagatattgatggaacgttggtccttgaccatcaaatcgtgacacctttgaccaaacgcgtgattcgaacattacaaaaacgcgatgtgattttctatattgccaccggccgaatgtacaatcttggccgggtaatttcgcggcaaattaacgatgatgtccggattgtggcttctaacggtgctgtctttgaaaatggccatcagatgaacaagcattatttaggtaaaaaagcgctcaaagctgcttacgaagcatgtttagcagatcccaatttatctgcgcacttttttaccactgacacagcttactatacccaagaaatccccaagtttgttgcgcgcgatgcggggaatttattgttgaatgccgatattgataatcaaccggtgactgatttagaaatgttgttgaatttaagtgatcagattactaacgggattatcattggtcgcggtcatccagagagtttagcagccgctaaacaacgattaatggatcaagctgtgatgagcttgtcttcttctggtccagacaacatcgagatgattccaaccgggattgataaagccactgcaattcgccagattcaaatgattcatggaattgatgccgatcatacaattgtctttggggatgggcaaaatgatttgggaatgttgcaatcagcgaagtacagtgttgcgatggacaatgccttaccagaggtcaaagcggctgcaaattatgtaacagaaacgaatacgaatgacggggtcgctaaattcttacaacaacattttgaattagcactttctgatacagaagttggtctctaggggcttgacccgctttttatttttcgatatacttatatcacggttgttaatcaaccgtgaaatgctgttttagctcagtaggtagagcatcaccatggtaaggtgggggtcgtcggttcaaatccgataaacagcttaaaaaaagagtgtgactcgaactgggtaggctttgaggattaacagggaaaagggcattatggcgggacttgccataatgccctttttgcagttaaccggagaagactgttcgaggagcacgttaaaaaatgagtgcattcaagcttggtcaacttttgagcattaagtcgagaataaaaggcggacaacatttctaacatgttgtccgtcttttttaggcttttctggttaataaacgttcagttaattgttgtagcgttgtttttgcgggcatgtcgggtagtttcgcaagaccagcgagtgcgcggtttgtgtaatcttgtgcgagtgcttgggctttttcgacacttccagattgacggacgatgccttgaacagcgtgcacatcggcatcagtcatagctgcttgtttttccaagtagggtgctaatgtttggcgattggattgcagtgccatgattaacggaatcgagtagacgccgcgtcgcatgtcatcgagaactggtttgccaaaatcgacatcggtctgagtgtaatctaagatatcgtccagaatttggaaggcgagaccgatatttaagccgattttctcggcttggcgggcaaacttcaagcctttttggctttcgtaagcaccgatgaagcaactgagcgcgaacagttggccggttttaccgttaatttgttgtaggtactgttcgggggttaaatcgagattatatcgggttgtcatctgactgagttcaccgtcaagaatttgatccatcgtttggctgttaaattggatgctcttcaaatcgctcgcataattggctagtaacttgaagcagacaacgaataagtagtcgccagcgtaaacggcgacatctttgccgaaacgggcttgaatcgattcttgatggcgacgtaaattggaattatcaacgatgtcgtcatgaattaatgtcgcagtgtgtagcgtttcaacagcggcggctaatgcgatcatcttctgtcgatcgactgcattaaactgtgaaaataataagcagtaagcagggcggagcaacttgccgccagcactaatcatctttaaaatggcgtcggtgacggcttgatttttggtgtgaatgttgtcttcaatgagcgcaagactttgcgcaagttcggtttcgatttctggatagttctgccacatggcatgtactttcgccataattaactccttgttaaattaaatttcgtgttgggcttttaaaaaagtcagggttttgacatgttcgaataaaaaattcgcggctacgccgaccgcaattccggcgagaataccgagaaaagcaagcactggtagatagaggaggacttgccaactctgggcaatgaaactcgcgacgcagagttgaccgacattaaagagcagaccaccagcagctgagatgccaatcatactcataaagcggcggctaaattgcttgaggagtaccatgccaaagaaacttagcgttgccccagcaatgctatacataaaagtagagagggttccccctagcaaggcggataaaacagttcgcatcaccatcaataaaaagcagtcgctgaccggtagggtaaataacgaaatgatggtaattaaattggctagtcccaacttagcacccggggctacggcaaatggaaatggaatcgcgcgttcgacaaggccaataataatcccttgagcgcacaagagtgcaatatagatgtatttacgcgtttgatcgttagtcatcgctgtactccttttaaatcaggcagaaaccatcccgcccgtgtcggtcccatccttggctttaatttcaatcagtaacttgtgtggtaagcaaacaatggtttggcctggcttagaaattttgccacgcttaacatcaatctgattgaagcaattggcttcagtgacctcaatggcatgatcggttaccttaattttgttgtaatcaccgccggcatcgcgataagtgaagtggctaacaccatggtgggtggttaggttcactttgtagacggttttgccatcgtgtttgacgtaggccgtcaatacctgcgcgtttgaatccgctgcttgcgtcgtttgccattcgtgccaactaaaaacagcaactggggcaaacgatagaataaacaggccgatgactactattatatcaccagggcgaatcattttgatgtaacggttagcgcgaatttgtttaaacataggcgtcagtctttctctctaaaatagcaataaaaggggttatgacaaaagcctgtctgtcataaccccctccttttgatagctgtgaattgcttttataatgtgctttcaaaagcattctattgcgtttagcactattagccaaacaactagctacgctagttattcgtctaattttgctaatccgcatagaataaacgcttttgacgcactcagttttataacgtgctttgaagttaactttctgcgtttagcgctgtgaatcaaatcatcgactatgtcgctaattcgcttccctgtgctaatgcttaaagtcaaaccgtttcaaacgcactcattgatttttgtatagtgcacgttgttggccgtagcgccagtgaccgagatgtttttgtaaatatggaacaacccatttatctaatccgaaggcacggcctgaaccgttcatgcaggcgagggccattggaataatccaaatgttaacccaatagaacatccctgaaaggcagaatgtgataaccattgcaacggttactgcgctcgttaaccaagtgaagagaccagcaattaaagctaagccaattaaaatttcaatgatggtcattgttttttgcatgaagaaggcgacttcttggtttggaatcaagaccttcgtgatgctgtagaaccagtggggcatcttatcgaagacgggcattggatcatgaccgaataagtaagaaaggccgaatgtgactttagcagttgctggttcagcagccccgcctgcagcggcaccgctagcagcacttgttgcatccgccgctttagaagcaccgctggtgacagctggttgaagccagtcaaaaggtaaccggagcttattggtgaaccaagaaccttcaccttgaaccttgtcccaacaatcaacaagccacattgcgcctaagaaaattcgcgcaggaactgtccataaaacattaccataccgtgaaatatgaccgcgcatcaagttgcgatcgttcttcgttctgaagaactcattcattgaatagtggaataaatcgtagccagaataaatctgaacaaaatagagcatgttgactaaatgtttaactaatgtggcaaagaacccactgagatggaagaaattcatcaagttggcaaccgcatagcgagaaccaattgaaaccatgaagccggaatagctccctttgtatgggacttttgctttaccttcttcagttgcgatgatgttctttagggctgttgcagcagatgcttcggcgccttgaacaatttggggttgaccgcggccgtcatcagtttcatcgaagaaagccacatcgccgacaacgtaaatcttgtcatcgtcaacagattgcatgaattcgtttgtcacgattcggccggctttaccggttgttaggccaaattgtgccgcttgtgaggaagctttgacaccagctgtccagattagagtggcagttgggaaagttgaaccatcatttaaatcaacatgcatttcgtgaacacctgtaacaccggtattcttgcgaacatcaattttttgtttagccatgtagcgttctgctttggctgcatcgttgcggtcgagcatgttcatgatggttggtgccatttccatcattgtaaattggatttcttcgggatcaatcttgttatcagctgctagttcatcacgccagtcgcgtaattcgccgatagtttcagttccggtaaagccagaaccaacaaccacgatattcaaaagggcccggcgtttttctgggtcgtgttcaattgccccacgacgaacaacatcgataatatgttgcttcaattcaacagcctgttcccatgaacctaaagtgaaaccatgttcggcaaccccaggtgtgccaaagtcgttaggttcactcccaatccccaacataacttgatcataggcgtagcgtccatgttcagtaatgacggttttgtttgcttgatcgatgcgggttaccgtatcggtcaccaacttaacgtttttgcggcgacagaagagatgttgcaaatcgtgttgaacgtggtcttctggcacgcggttagcagctacttcgtgtaattccgttaaatacgtaaagtaggaatgtttgtcgattaatgtaatttgataatctggattcttcttgtaatatttcgcaagttttttagtcgcatagatcccggcaaaaccggcaccgatgatgacgatgtttttttgagccatgatgagccacccctaaatgaaataaatgcgttttcaatcagtatccattatacagaataaactaaagattgtctatttattcacggataagattaatgggattgatgactattaaggaaaccgttttaaattgtgtaaaaccaaagttaatcgccgtaaaataagtgatttaaaagacttgaactttttacataaaaaagataaactgactttgtgtgaaggttgatacaaactatatgattatttatgaaaagggcgggaaaattatgaaattaagtaaagcattagctagtttatcagttgttgcaatgtcagcaatggtattagcagcttgtggtaatagtaataacgctaaagattcatcttcaaaagaggcaaaatctagttcagtcaaagaatcatcaagcaaaaaagcaaccgctaagaaacaagttgccggcggtgaattaaaagacggcacttacaacttagaagaaaagaactacgaaaataattatcgcgttaagatgtcaatgaccgttgccggcggcaaagtgacaaagacaacttacgattacgttgataaagatggcaagtcaaaacaagatgacaagacatacaacgaaaaaatgaagaaagtttcaaaaacaaatcctaaagaatatattcctaagttgaacaaagaatttacagataaaggtgcagatgtttcaagcatcgaagtcgtatcaggcgcaactcatagctcaaattcatttaagaattacgcacaacaattagtgcaagctgctcaagctggcaacactgaaacaatcgaaatcgacaatggtgctaagatgcaagatggcacatataagttagaagaaaagaattacagccatgactatcgaacagttttcacaatggtggttaaagacggtaaaatcactgaatctaaattcgataacatcaataaagatggcaagtcaaaagctgacgatgctgcatacaacaaacaaatgaagaagattgctaagactgatcctaaggaatacatcgctaagttgaattctgaattcgtcaaagcacaagaaccaggcaaagtagatgttgtttctggtgcaacagaatcatcacacagcttcgtcaactatgctgaacaattagtcaatgctgcacaaaaaggaaatacagcaacgattacagttgataacatcgtttacggtgaataaaacgggacttcggcagtcagctgccaatgaattaatgggtaactgtctgctagaaggtacgatgaagctaggacaagtcaatttgtcctagcttttttaatggaaggaagtccgagatgtcttttaaaacgtttttagaatttgtccggattgaggccaagacagcgagtgtcttgcctttaatcttagggattgtttattgttggtacgttaatggccagctgaatccagtgacgacagttgtttattttgtcgcccagttttcgattgcattatttgtgactggctttaataatgtgatggattactacaaagcagttgatctggattatcgggcacagacgaatatcattgggcgcaaacatttgtcgccaaccaaggcactgcatttaatgctctattttttattgttcagcatggcggctggaatttggttggtttggcaaacgaatattttattactattaatcggtggcgcctgtatttttgtggccgtcttttacacgttcgggccagttccgctgtcgcggatgccggttggtgaattgttgagtggtgtgacagaatcatttggtgcattttttatcatggtctatgtcaacgtaccaagcgacagcatcatggcgctccattttgattggccgacgtttacccttaaaggtcaattaccaacattgcttagtttatgcctaatcggtgtgattattgcaatccccacttcgaacattatgttggcggataatatctgtgatctagatcaagatcggcgcaatgaacgttatacactgccgcattatttaggaacaacctgggcgttgcggttgtataatacgttgatttggttctcactagtggccgttgttgtggcagtgattacgaaggtcttaccgattgaatcgttactattgttattattgattcctgtcattttacgcaataatcgccggtttaatacgcggcaactgaaggatgtcacctttattaccgcgattcaaaatgcgatggcgatcaatattagcttgattgtcagcttgttattagcgattgtccgcacgacctggtggggataatccaccacattgacagtttggtcaacacatgataaagtaaatgggataaacgtcaattagagaggggcttttcatatgggtgttaagaaagtcgccttagcctgtactgtctgtggctcacgtaactactatgttgctgagaacaagaatcggacagaacgtctagagttaaacaaattctgtaaacattgtgggcaatactcacaacacaaagaaacgcgctaattaggaggaaataagatgattaagttttttaagagtgttggtcaggaaatgaaaactgttagttggccagatgccaaacaaacacgtaaagatacatcaacagtcgtcatgacctccgttttattcgccattttctttggcgttgttgattttgcaatcttaaaagtactacaattatttatcttttagaactggcttaattaagccggatttgctatactaatggcaagcaaaaaacttcgcgtggtcggagtttttttattttggtatttaaaaggagaacgcacatggttgaatcaatcgaaaaaagctggtatgtcttacacacatattcaggttacgaaaataaagtgaaggcaaacttggaatcgcgtgcccaatcaatggggatggagaacaatgttttccgcgttgtggtgcctgaagaagaagaacatgaaatcaaaaacggtaaggacaaagtcgacatgaagaagactttcccaggctatgttttggttgaaatggtgatgtcagacgaagcttggttcgttgtgcggaatacaccaggtgtgacgggcttcgttggttcacacggtgcaggtagcaaaccagccccattattagatgatgaaatcacacaaatcttgcgtcaacttggcatgagcactcgtcatttggatgttgagttcaaagtcggcgaatctgtgaagattatcgaaggggcctttgctggccttgtcggtcaaattacagaagttgacgacgaaaagatgaaattaaaggttaatatcgacatgttcggtcgtgaaacagcaacagaattagactacgaccaagtagacgaactagtttagagtgcgacttcagtcgggatgactgaaggagcacgtttcgaaaaaagagtgcgtttgaaacggattgactctgagcattaacctaatttggcgaattggtgctacaagcgccgatttgacaaatgtagttaagcgcaagagtcagtttcaaaaagcacgtttcaacaattaaagtagggggctaggatttgtcccaagccccaacaagataggcggctgagacgaaagatgatttgtctcagccgctttttttgaacaatcaatagtgtctatttcgaaagaatgatgtgatgacgatgtggtatatcattgatcaaatattaactgcagtgggcttagtcatttttttgttagtcttactggcaggactggatttttacaaactaatccgggtttcggcacattggcggccgtgcgcacgtttatatacaaaacaaccaacgctattcattcatggctatcgggggaatcgctattcattcggtcacttactcggacgcctacaaaaagccggaattgctaagaagagcatggtcatttgggtgggcagaaacggtcgattgcatgtggatggagacgcggcgttgcaggctaataacccaacgattcaagtcttatttgctaataaccgcgccgatgtgcaagatcaagtccgttggttagctgcgattattgaacacttaaaagaagcgtatggcgttacgcaagttaatttagtagggcattcgatgggcgcaattacggtgttgcgttatttgttgacatcagaccatgccgtggtggacaaagtgatattgttggcagcgccagttaatgatccatcaattggtccggatacaccacttgttttttggagcgagttaaccagtcgtggaccagttaaacgaacacgtaattataattatttagccgtgcgggccaagtattttccaactgcgatcagtgtcttaaacattgctggcgagttactaggaactaatcgacacgatggttcggtagcagtcgatagtagttttgcattgcgtagcctattaaaaggacacgtgcgccattaccaggagatgttagttcgtggaccgggtggagcacatagcatgttgcacgaaaatcgtttagttgatcaagccattgatgatttcttgtggcgcgattaatggaatcgccttgctttttcggcaattgcttggtatattattaaggtatgttttcatacactagtgggagaccaaatataatggccatcttaaccacatcacggacttaaggaggtatgtttcgtggctaaaaaagtagcaaacatcgttaaacttcaaattcctgcaggtaaagcaactccagcaccaccagtaggtccagctttaggtcaagctggtatcaacattatgggctttacaaaggactttaacgctcgtacagctgaccaagctggtttattaattccagttgtgatcactgtttatgaagatcgttcattcgactttgtaacaaagacaccaccagcagcagttctcttgaagaaagctgccggtgttcaaaaaggttctggcgaaccaaacactaagaaggttgcaactgtaactaaagctcaagtgcaagaaatcgctgaaactaaaatgcaagacctaaacgctgcagacgttgaagctgctatgcgcatggttgaaggtactgcaagaagcatgggattcactgtcgaaggttaattcatgcttgacactttcagtcggattttcaatgaaagttgaaaaatcaagtgggaggtcaaaaaccgttcaccacaattgcaaggaggaaaaccctaatggctaaaaaaggtaaaaattatttagaagctgcaaagcaagtggatgctactaaagcatacactgttgaagaagcaatcgacttagtaaagaaagttgattttgcaaaattcgatgcatctcttgaagttgcatatcgtttaaacgttgatcctaaacaagctgatcaacaaattcgtggtgctgtcgtactaccaaatggtacaggtaagacacaacgcgtgattgttttcgctcaaggcgaacaagcaaaacaagctgaagctgctggtgctgacgtagtcggcgcagaagatttagttgaaaagatccaaggcggctggttagactttgacgttgccgttgctacaccaccaatgatggctcaagtaggtcgtttaggccgtgtcttgggacctaaaggcttaatgcctaaccctaagactggtacagttacaatggacgttactaaagcagttaacgacattaaagctggtcaagtggcataccgtgttgataaagctggtatcgttcacgcaccaatcggtaaggtatcattcgatgctgctaaattagtagaaaactttaaagcgatgcaagacgtgatcatcaaagctcgtcctgcttcagctaaaggtcaatacattacaagtttatcagttagctcaacatttggccctggtgtcaaagttgacgttgctagcttctaagttggtaatgcaaaaagcgctcatccgaaaggatgagcgctttttttgttgctataattaagcattaatgtcgataatttcgaattttgtgacatccactaaacctttatctgtaatccgcaagttcgggatgacgtcgagtggcattgcgccgagcttcataatcggatcgaagtgagcggtgacgtggagtttatcgtggcaaatagcattgaaggccttttgatgttcaattaaagtgtcgatgggttcgttactcattaagccgccgatgacaaatggtaatgttgcgatgacttggccatcccgaatggcaacgccaccgccttggctttctttgagcgcttcgatggcaacgaccatgtcagcatcgttggtaccgactactacgaggttgtggctatcgtggccgatgctggtggcaatcgcaccgttcttgatgccaaagccgttaagcaggccaaccccgacattaccagtgagatgatgtcgttcaactacggccactttagcgatgtcttcgtcaggatgatattggaaatcaccgtctgcagtgtgagcgaccggtaagacgagattttgtgtccgactgatgctttgtaagccgatcacgtgggctttatcgcttgtgaggttgagttttaattggtcagcggtgaatgtatcgaggtgtacggtttgtaacaagtcatcaaaaccagtaactgaatcttcagttgttagtaagtattcgccgctagcagcaactttttgaccatcgatgaaggtttgattcacactgaattgttcgagatcatcaaccaataggaaatcggccttcaaaccaggtgcaatcccgccgcggtcagctaagccggtgcattgggcagtgttgatggtggccatttggattgccatgatggggtcgatcccgtttgcgatagcaacgcggatactttcatccaagtggccggtttcacggagggttacggattgtaagtcgtcaccgcagagacaacagaaacgtgcgttttgcggcgtcacgcctttcaaaagggttggcatattcttagagacggtgccgtagcggagataaacatacataccgcgactgatgcgatcgagcatttcatcgacttgggtacattcgtgatcgttacgaataccagcagcggcatatgcgtttaagccttgttcttttaaagcgggtgagtgaccgtcgatgagtttatttgcgttgagtgaaacgagtaattcgtctaaaacgccatcatcagcattgacaacaccgggataattcatgaattcggcaaggccgtaagtgagattgcggtcgtaagaatcttggatttcagcagcggtaatcacagcaccagatgtttcgaggcttggattagcagcaggcacacacgagggcatggtgtacttgatatcaagtgctgtctttttggcagatgcgaccatgtattcaagcccccgcatgccagcgacgttcacgatttcgtgtgggtcggccaagatcgtcgttgtgccatgtggtgttacaagtgatccgaagacagcgggtgagacattggcagattcgatatgaatatgcggatcaatcaaacctggcacaacatattggccgcgtgcatcgataacttttggtgcaaggtagtcgtcgctgataccgaggaagcgaccattaccaatcgcgagtgtgccttcgataatacgaccattgtagacatcgacgatttttgcatttttaatgaccatgtcggcagcttgacggccagcagcttgatcaattagttgttttaaagttgttttatccatgagtaatctcctttatttagcaggtaattcgtgcattgtgaagagtaataataggaataagagcgcagcgatatacataatcggatgcacttttttacctttgccagcagcaatcatggtgatggggtaagtgatcagcccgaatgctaaaccgtatgagatattataggttaatgggacgcacagaataatcatgaaggctgcaaaagaagtttcgaattctgaccagtcgatgttgacaattgacttcatcatgaatgaacccacgatgattaagattggggcagtcacttgcgacgtcacaacggccagtaaaggtgagaagaataagcttaagacgaacatgatggcgacgaccacggcggtgaaaccagtccgaccaccagcagcaatcccagttgatgattcgatgtaacaagcagttggggttgaaccgaaaacggaaccggcaatcattgaggttgaatcggcgaaaagggctttgccgacttccttaggcatcttgttgtccttgatgaaaccagcttgttgagcaagtccgattaccgttccagttgtatcgaagaagacgctgaagaaaaagacgagaattacgacggccatttgaacattgaagacgttgtggatgttcataattgagacaccgaaagtgggtgctaagcttggaattgaagcgatgatgctgtgaggcattgcgattagaccagtcacgactcccatgatggctgtggccgccaaaccgatgaataaagcgctagggactttgcgggctaataaaacaatggtgacgattaaaccgaagacggtcaaccaaacgtgcggatctgaccaactcgtaatggtgacgaatgatttagcactaccgacgacgatgcccccttgttttaacccggtaaaggcgatgaataacccaatcccaacggccatggcggcttttaaattagcgggaatcgcgttaatcacgacttcgcggacttttaagaccgtgacaagcatgaaaaggagggaagcgacgaaaacaccggcaagtgctgtttgccaaggaattcccatgcctaaaacgacggaataggcgaagaaagcattgctgccgagtccgggtgcaacggcgattgggtagttggcgatgaaggccatggctaaacagccgaccactccagttaatgcggtggcgacaaagacggcccccttatctaggccggcgtcgcctaatatagttgggttgacgaataaaatgtatgacatcgcaataaaagtggtaattccggcgatgatttcggttttaatggtcgacccacttgccttaattttgaattgacgttcgaaccagttcgttcgtgtttctgttgcaatatcaatattcttatccattatgcacttctgaattagtattttaagaaccttggcattattgtacaacaaaacaatcgtgtttttaagaagaatatgaaaaatgtttattattttgtaaatattgttcgttatttggtgatgaaaagggtttattttatcaaaaaagagccattagcgtgaaaaacgctaatgactctctcataattcgcgattaatttagatggttgttaggacgtgattagcaatcgccaattcttcgttggttgggatcatcaagactttgatggctgaatcgggggtactgatttgacgggcacctgagccgttttcgttcaattcaggattgatttgaacacctaaaacagccagcttggcacagatatcagcacgtaaacgggcgtcgttttcaccgatgccggctgtgaaagtgatgacgttcgcaccaccgagttcaacgtggtagctcgcgatgaacttcacagcagaagtgataaacatgtcgtaggcgagtttagcccgtggattggtagcgcgtgttgattgaatatcgcgcatgtcagcggaaacgcctgaaacgccgagaatccctgatttggcgttcaaaagcgtgatgacgtcatcggcactcttatccaattcgttcattaagaatgggacgatggccgcatctaatgaaccagcgcgagtgcccattggaatgccttctaacggtgtgaagcccattgatgtatcgacaggcttaccattttggctggccgtaattgaagaaccgccacccagatgaagtgtaattaattttaaatcggcaacgggttctttcaaaaagtcagctgttgcttgtaagatatagctgtgactaatgccgtgttcgccatacttgcggatttgatagtcttggctgtattcataaggtaagccataaaaactagtttcatctggcatatcgagatagaattgactatcaaagacagccacttgagggacattagttggtaaaatatgcatcaaggtttcaatgcagtcaacttgcacgggattgtgtaaaggtgcatacttgtcgagttgttttaatgtatctaagttggtgcgatcaataatggttggtttttcgaacgtggtagcaccggcaacgacccggtggccgactgcaatgatgtctgcgggtgaatgaatgatgccattgtcttcaagttgtttcaaaagtcgaagaacaccatcttcataggaaagattagcaatggcgacttgttctttttgaccttggaacttgaaggtgaagctagcttctggtgtgttcatgcgttccatgagcccgcttgccagtaaggttaaatcagattgttggaatagttgccatttcaatgatgaactacccgcgttaacgactaaaatattattcaaaaaactgcacctcttacgattaattttcttgatagtctcaattttaaaccgttttttcagaaaaataaaataagtaaaacgtaatgctaggataactaaaattaagtgccgataatgattgacgctttatggaatccatgctatatttgtagttggttatttatgctaccgaagactcaggtgccaataggcttaatatcctgccgaggaagatacgttgaaatccctctctatgtcttggtggacatggagttttttatttttataaggaactcttgaccacaagttttacaaatctaatggaggtgaatcaattgagcgaaacaatcattgcaaaaaaagcacaaattgttgacacagttgttgaaaaattcaatagtgctgtttctatcgtcgttatggattaccgtggcttaacagtagaacaagtaactgaattacgtaaacaattacgtgaagctggcgtacaaatggaagttgttaaaaacacttacttgcgtcgtgcagcagacaaagctggttacgaaggtttggatgatacattcacaggccctacagcagttgcattttctaacgaagatgttgttgcaccagctaagatcatcgctaactttgctaagagtgctgatgcacttgaaatcaaaggtggtatgattgaaggtaaagtggcaacacttgatgaaatcaatgccttggctacattgccaagtcgcgacggtttattatcaatgttactttctgtattacaagcaccagtccgcaatgtcgcatatgctgttaaagcagttgccgacagcaaagacgaaccagctgcataatttaaaattgtgtagttaaaagtgttatcaaaaaatattacccacaaaatggaggaaacaaaaatggcattagacgtaaatgcaattgttgatcaattaaaagaatcatcaatcttagaattaaacgacttagttaaagcaatcgaagaagaattcggtgtttctgcagcagctccagtagcagcagcaggtgcagctggcgcagacgcagcagctgaaaaagacagctttactgttgaattatcagaaatcggccaagaaaaggttaaagttatcaaagccgttcgtgaaatcacaggcttaggcttgaaagatgctaagggcttagttgataacgctccttcagctcttaaagaagacgttgctaaagacgaagcagaagaaatgaaagctaaattagaagaagttggcgctgtcgttaacttgaaataatttaaatagagcgcccttggcgcttgtttagattttgagcactaacctaaaatcgggcatcgtggcgatctaagccatgatgcccgatttgtagttaagcgcagaaatctagcgccaatggcacgtttcaaaataaagtgcgtcattaacgggttgtttttgagcatttgcctaatcagccggtgatttgactgatgtagcaaagcgcagaaagcagttaatgaaagcacgttttatttctaaaagaaccccactaatgtggggttctttttttacatatttttttgtaaaacataaatggcgagttgcacaaaataacacgatgctaaatatggattccatatcttaagcgacagccattgctgttgagaactaaaaaggcaatcagaggatattgattgtcgggtgaacgggaatcggattgtgctccgggtaagtaataagcgaaaatcataatctaacagccatctaacataattgtcattttactgtgttttgccttgggatagcttataattaaattaattaagttaaggagcggttgatatgcgaaaatggggcaaacacatatatgaaggaattcagcgacacctaacgttgttaaaaggcatcttcatcctttcggtgatggtctttgttatcctagaagtcggccggattttccgggacttgaacggggaacaattgaaagcgagtttaacgacacaaagtccgtggaccttgctagcgatgctggtgattgggtttgtggcggtcttgccaatgctcaattatgatttcgtgattgcggagttgctgccggaggactattcattctggtataaagtcaaatctggttggatcgtcaatacgtttacgaacattgccggattcgggggcttcttaggtgcgagtttacgggccaatttctatggtaaaaaagcgtcacaaaaagaaatcttaattgcgatttcaaaaattgcgctgttcttattagccggcctgtcaatctggtgtctgattagtgtcgttttgatctttggctttggtattggtgggatgtatgccaactactggttatggctagtgggcggttcgttgtatttccctggtctgatgattagtacgcgctttaaaaatgcggcctttttcaaagatctttcgatgcaacgcgttttacgcctaacattagggtctttcttagaatggggttttgcgggcggctttttcttaacgattggttatttcttagagattaagggtgacttattacaagtcttaccacttttcatgattgccaacatcattggtgttatttcgatggtaccagggggcttaggaacgtttgatttgttcatgatctttggtctgagtgcagtcggcgttcaaaatgcggacgccgttgtctggttgtcattttaccgagtcttttattacatcgtgccgtttttagtcggcgttggtttatttactcacgatgcaggcagccggttaaatcattatttacagggcttacctcggcaggtgatgcaaaaaatcgctcatcacttcattgttttcttcctttatatttcaagcatcattctattattagtagcaactgtcccgaactttgcgattaccaacacagtgattggacagctctacccatacacgttcttcttcttagatcgtgtgacaaacatcattgtagcgtttgtcatgttggccttagcccgcggcgttgccaaccgcgttcaaaaagttttctggccgttgatggtgctattggtgattgcgattgccaatacactatggcgggatttctcaatcaaactcgctgtctttttaacttttgtgctcgtagctagtttcttattgaaacgcgaattataccgtgaacggatcgaattttcatggaatgatcggattgtggatggtgtacttttcgtgggcgccttcttgttatacggctttgttgggattgccaattcgccacacttacggcatcgcaaacccgtaccaacagcgcttttatttccatccgaaagagtctggttggctggttttatcgggatgttggttgccgcagggaccttatatctcgtctaccgttatctcagtcgagggggccgttcaatagcagcgccatatgatgaagcacgaattgctaacgtgattaacacttacggcggcaatgaggtcagtcatttggcatacttacgggataaatcagtttatttctatcaggaagaaggagaagatcaggtattcttgctttatcgtaaaaaagcggatcgcttaattgtaatgggtgaaccagtcggaaatccggctaaaattttaccggcaattgaacagatgatgcacgacgctgatttgattgattgtcatttagcgttctacgaaatttcaagtgaattaacgatgcaactgcatgaaatcgggtttgactttatcaagtttggtgaagaaggctacgtccgtttggcggacttcacgatgactggtaagaaacggcgggctgaacgcgccttaatgaataagtttgaacgtgaaggctatcaatttgaaattttaaacccaccatttagtgccgaattaatggcagaactcaaagcggtttctgatgattggttgggtagtcgcgttgaaaaaggcttctcgttaggctttttcgatgaagcatacctccaaaaagccccaattgcagttgtctataatgccgatcaccaattaattgctttcgctaacgaaatgccaacaggaaccaaagaagtcgcaagtattgatctaatgcgtcacagacaagacgcgccatctggtataatggatgagatctttattaatctctttgaacaaaatcgaacggatggctacacgtacttcaacctcggcatggcgcctcttgcaaatgtagggacttccgagtttagctttattgaagaacgaatcgctcatctgatctatgaatacggctatcacttctacggattccagggattacggacctataagaagaaatatacgacggaatggcgttcgaaatatatcgcttatcaaaaacggacctcattaattttcacgatggttcaagttttaatggtcgttaatcaacgggttgcggatcaaccgcatcctggtggcttgctaggtcgtttgatgaagtcagttcaaattgggaaattttcagataactaacgacaaatgaggaaaaaagatgacagagtattactattctaaaaatccagacgttgaacacgctgagcggcaatggacgtttgaattacgcggctttaattttaaatttacaacggataacggggtattctctaaaagcactgttgattacggttcacgggcattgctagcagcggtcgatctgagtgaagcgccagctggtccagtgcttgatatggggtgtggatacgggccaatcgggatgacgattgctaagctcgcaccagagcgccgaatcgacatggtcgatgtgaatgaacgggcattggatttggcacgtaagaacagtgaattgaatcagattaccaacgttactgtattcgaatcagctgaatatcaaaacgtaacggatcaatacgccgccatcttcaccaacccaccaatcagagcgggaaaagatgtggtgcaaaatattttgactggtgcctatgatcacttattaccagatggtgaattgaacgttgtgatccaaaagaaacaaggtgccccatcagcgaagaaaacgatgatgagcatttttggcaacgtgcaaattattcataaggataaggggtattacattctccaaagtattaaattaaagtaaggaccggggttgaaagcggtaaattcaggcgaattgtgctaaactatgattaaagtacaaggaggttgatacgatgaaaaccagatataaaattttaatcggcgtaggggtgactgcagcagttggcgcaacgaccgcttttgtcggttctaaggcagtaatcgataaagtatcgcgctatcgcaaacgattagcagttaaaagttttgtaaaagacaaattacatggtaaccaaaaggcgttagagttggtcgatcaactctccgatgcggatgtgaataacttgttgactgcggcagacaggttaacccaattaaaagataagcttggcgaacacgcagacaatctaccagatatgatggatgatttgcgccaaacactaatggcttacgcaacaaaggtgaaagaaaaactatagagtgcgactcgagttggtcaggctttgagcattaacagtgaaatgagcattatggcagtccttgccataatgctcattttgcagttaaacggaagaggatggcttatggagcaattaaaaatggtatcgacaatccgtcggcaccatttttaattgctcgactagcgcgactgtgttttaatagttgagaagtaaaataaaggggcgactaacgcgtgagtgaaacacaacaagagatcgatcaatggatgcaagccgccatcgatgaagctaaccaagcacgcatcattggcgaggtaccgattggcgccgtgattgttaaagacggacaaattattggacgggggcataacattcgcgaacacgcgcaagatgcgacgttacatgctgaaattctcgcgattcaagaagcctgtatggttgaaaagagttggcgtctggaagataccgcgatttatgtcacgttagaaccatgcccaatgtgtgcaggcgcgattatcaatagccggattcccaaagtttattttggcgcgagtgatcctaaggctggtgtgaccggcacgttgatgaatttattaactgacaaacggttcaatcaccaagctgaagtggttggcggggtgcgagaagctgaatgtgcgagtttattgcagactttttttagaaagattcgcgaaaatcgccgtaaaaaaaaagaaaatggctggtaattaatgcttgaatcaggtagaataggaattgccgaaaggccttgagacaatgatgagcctacgaatcgtgtcaggttcggaagaaagcagcactaagtttgttttatcatgtgtcttaagttttgtgaaaattaaccagacccaacggacaattaattttgtcggttgggtcttttttcatgcaacgcaatcaaaattgacggtaaaatatgctaaaatggaacaagtagttttaaatgaatcggactttaaattgcaaaggtggaggtcattaaatgagctatcaagctttataccgggtttggcgcccgcagcgtttcgatgacgtgattgggcaagaaacaatgacccaaacattgaaaaatgccattatgacgcaccaaacaagtcatgcttatttatttacaggcccacgtggaacagggaaaacatcggctgccaagatttttgccaaggcaattaactgtcattatcaaaaagatggcgaaccatgtaatgaatgtgagacatgtcgggccattacggctggcgccctcaatgatgtgattgaaattgatgcggcgtctaataatggggtcgaagagattcgtgatattcgggataaggccaaatatgcgccgacccaagctgattataaaatttacatcattgatgaaatccacatgttatccactggtgcgttcaatgcactgttgaagacgttggaagaaccaccaacaaatgtggtattcatcctcgcaacaacggaagttcacaaggtgccagcaaccatcatttcgcggacgcaacgctttaattttaagcggatcacggccgctgatttatttaagcgaatggcttatattttagatcaaaaggaaatgacctatgatccagcagctctgaaagtgattgccaaagctgctgaaggtgggatgcgggatgctttaagtattctcgatcaagtgttatcctttagcgacaatcacgtcacgttggataatgcgttggatgtgacaggcagcttaaccgaagcgttgttggcggattatgtccaaacaattcaggataatgcgcctaaacaagcgttgcaattgttgcaacagattttggctgaaggtaaagatgcccaacgttttgtggaagacttaattgaatatgtgcgcgacttactgttgtatcaacaagcacccgaattagtcgccgcaagtgaaatggatctattggatgaacacttcaaagcgctcagtgcagcgatgccggctgaccgtttgtacggggtgattgatatcctgaatgaaacgcaacagcaattgcgtttcacgaaccatccagaaatctatctggaagtcgcaacggtccgcttgacgcaagtccagacagcccaagtaacgactacgatgggtgccgcaccagctgctgataatgaacaagtcgcagcgttgagtcaacaagttgcacaattacaagcggcgttacaaaaattggaagcggcgggaccagtgagtgctccagctgccaagccaaaggccaaacctgctaagaagattagtaaaaaggtcaaccgtaaggcgatttatccggtattggcagatgcgacgcggaccaatttggagaatctcaaagaagtctggccggatctgttgaatatgttggacgttaccaagcgcgccgtgatgaaggtttccgaaccggttgcagcgagtcaaagtggcgttgtcgtcgcgtttaactacgcgattttattcgagcgagctagcaatgatcaagaccttttgaacattttagaaaacggattgaatcgtttgactggcaaccccttcaaggtagttttagtgccccacgatgtttggccagaaattcgccaggaatatttacagaatcacgcagtaccaagtcaacaggtaacaactgatgacgaagcagaagcaacgccgaaaccagaacaaaaaccggccgttgtcgaacaagcacaagctttgtttggcgatgcggtggttgttaaaaaagattaacgtttaaatttgaaaggaagtaatgaagatgcgcggaatgggtaatatgcaaggtatgatgaaacaaatgcaaaagatgcaaaaagaaatggggcaaacacaagaagccctcaacaatacagaatttgtcggcaaagcagccaacgatttagtcgtggtcacaatgactggcgacaagaagatgaaagacattgccattaaaccagaggccatcgatccagatgatgttgatatgttacaagacctcattatcatggcaactaacgaagcgatgactgaaatcgataaacaaacacaagcccaaatgggtaaatttactaaaggcctcccattttaagtgagacattaaggaagtgcattgatgcaatatccagaaccaattgcgaagctgatcgaaagctacatgaagttacctgggattgggaacaagaccgcaacccgattagctttttacacgattgatatgaatgaagacgatgtgacgaatttcgccaagaacttaatttcggcacgtcgtgatctgcattattgtagtgtctgtggcaacattacggatgaagacccgtgcgaaatttgtcgcgatacaacgcggagtcaagacatgatcttagtggttgaacaaccgaaagatgtcatgtcgatggaacggatgaatgattatcatgggctctaccatgtcttgcatggggtgttatcaccgattgaaggcaaggggcccgatgatattaacatcgccaatttgattaaacgattgcaaaaaacaccggctaaagaagttatcattgctactaatgcaacacctgaaggggaagcaacggcaatgtatatttcgcggttgattaaaccagctgggattaaagtgacgcgtttggcgcacggtttatcagtcggtagcgatattgaatacgcagatgaaatgacgttgttaaaagcggttgaagggcgtcaagaaatttaagaatggtgggtttgcgatgtttggtagaaaaaaaccgacattaaaacaattaggtgatcaagccttattggatttagtgtaccaagtcaaagataaatggcagatggcccaaaagacgcaagacaacgtccgcggactcgatgaccaattagagatggaaagtaagattcaacaagcaaagtttgaattcttattccgccaagcccgccaacgtaaagtagcaggtgaagcagtttcgaaagaagcagcaactagaaatacatttagatagcgcgggcattcagatgacagccgcagcgtgaagacaaggtcgagtgactttgtctttttttatttcaaacgtctgctgtcgcacgctaaacgcaagaacataaccgccggatacgcactcttccctttacgtcttttgttgaatcaagtaaaatggaagtaactctatggatgaagaaggttgttttgtggtaggaaaattaattacgtttgaagggccggatggtgctggtaagacaagtgcgttgatggctgttgtaccgctacttgaatccaagtgcaaccaagacatcattgttacgcgcgaaccaggtggcaatccgattgccgaaaagattcgcaatgtcattttagatgttgaaaatacggcaatggatgaccgcaccgaagcactgttatacgctgccgctcggcgacaacacattgttgaaaagattgaaccagcgttggctgataacaaaatcgtgatttgtgatcgatttgtggatagttcaatcgcttatcaaggggcaggtcgtggcatcggtgaggaagtcgttgcgcaaatgaacttatttgccactaatggattagcgcccgatttaacgttataccttgatgtaccatctgaagtcggtttacaacggattaaacagaatcgacaggatcaatatgatcgattggaccaagagaagttggcttttcaccaaaaagttcggcaatcctacttacaacttgcgcaagataatccagagcggattcaaacgattgatgcgaccgcagacttagacacagttgttgccaaatgtctgcaagtgattgaacaacgatatccagacttattcacagcatagaaaaggggagattgaaatgaaattacttttagcaattgttcaagataaagatagcaacttattaagcagcgaattaatcgatgccaacattcgggcaaccaagttgtcaacgactggtggcttcttaaaatctgggaatacaacgtttatcgtcggaattgaagacgaacgggttcctgaagcgcttaagattattgaaaaaacgtgtcaggcacgcgaacaattcatgacaccgcctgttaatatggatgccacgatggatagctcaatgtcatatccgattgaagtgcaagtcggtggggcaaccgtctttgtgatgccgattgaacagttccaccgcttctaatcgatggccagtttaacaattgaacagcttcaacccaaacttgtggcccagtttgcccagattatcgcgcgtggacagatggcgcatggttatctattagctggtgcacagggattggggaagacacaattggcacagtggttggcactgcgtctgttctgtcaacaagtgacaccagatgggcaaccttgtcggacatgtccggaatgtcagcggattttgacgcataatcatccggatgtcattgaaattaagccggaaggtaagagtattaagattgccgatattcgctatttgaaacaagaagtggctaagagcgggatggaatccagtcaacgcttattcattattgaagctgctgaaacgttaaccgccagcgcggctaatagtttgttgaagttcttggaagaaccggcgcaaaatgtttacgcgattttatgtacgagtaataaaaatcaaatgctccccacgattttatcacggcttcaagtgattgatctggcagcattggcaccacaaatggtgcaacaacagtttgaagcagctggtattttgccacaacaagcgcagttattggtgcatttgacgagtgacttagctgaagcacagaccttattggcggatgattggctattacaagtcagtgcgaagcttgccgcgtgggcacaaaaagttgaacaacgtgatttagaagcatttgtgcagattcagacgcaaattttaccagtattagttgatcgccaacagcagaagacctttttaactttggtgggcttatggtatcaagatttattgaattaccgctatgaattaggcgtcacaccttgttttggtgcgtacgaaagccagttaaatcaggccagcgccgcgttgactaccacgcagttggtcgctcagacggaatatgctttacaagcacaacgcatttttgaacaaaatattagttgccaaaacgtcttagagagtttaacgttaaagttaattgcatagtaaaacgcataaccagcgtatcgggaggatatcaacggtgagtaaagacttatatgaacagttatcagacattgaacagcaagctaaattgacgtttgaggggctcagtgaaatgaaagcagtccttgccgaagtccttgagaaaaacgctgaattaaagattgaaaacaagcacttgcgggaacatttgcaagaattggaaccatcagccaccccgcaaacgggtaaggaagggtctcaagccctttcgaaatcaaaacaaaacttacagaatctttacgaagaaggcttccatatctgcccgtacttttatgggtcacgacgcgaaaataacgagccttgcgcattttgtaatgatgtcatctacggcgaacgaacaaatgattaaaaaaggcagggcaaaagggatgcttacttttggcctgtctttatgtcattattgatggatcttgaaaggatagaacatgcaaacacaatcaagttttaaaacgacggaaatgggaactttatttttagtaccaacccccatcggtaacttaggcgatatgacctaccgggcaatcgatacattgaaatcggtcgcactgattgctgctgaagatacacggaatacgcagaagttattgaaccactttgagattgaaacgaaacaaattagtttccacgaacacaatacgcaacaacggattgaaacgctgattgaaaaattagaagccggtgacgatattgcgcaagttagtgatgcggggatgccatcgattagtgatcccggtcatgagctcgttaaagcttgtattgaagcgggcatttcagtggtgccattacctggagccaatgccgggattacagcgttgattgcttcgggcatcacaccacaaccgtttacgttctacggttttttgcctcgtaaaggcaaggagttaacggaagccgtaacgacgttggcacaaaagcctgaagcacttatcttctatgaagcaccgcatcgtttgaaaaagacgttgcaagctttgctcagtacgtttggcgccgaccgcaaagtcaccttggggcgcgaactcacgaagaagttcgaagaattcattcgtggcgacctagaagaagtgcttgcttgggcgactgaaacagaattacgtggtgaatttgtgatgatagttgctggaaatccagcaccagatgcaacggtcagtgcagttgcaacggaatcgctatcccttcctgaacaagtggaagcccagattcaacaaggagccagccccaacgtggcgattaagacggtcgctaaagcaaatggcttgaaaaagcaagtcgtttataatgcctaccacgaattaacagaatagaggtcacgccatgccaggaaagcaatattcagaaaactatcaaattccgtatttcgaaacggatatcaagggcgaattaacgcttgcatccttggtgaacattttaattttagcatcagagcatcaactcaatgcgctcaacgtcggtgaagcgacaatgcatgcgctcaatcttggttgggtggtcacgcagtatcaaatgaagattacgcggatgccgaaggtggatgaaaaagttaaaattgtgactgaagctgagagttacaacaagtatttctgttaccggaatttctggttatatgatgaagccggcaacgaatgcgtcttcgtccaaagcatcttcgtgatgatgtcgtatgaaacacggagtatggtgcaagttgtgccggaaatcatggcaccattcgagtcaagtgagattaaaggtagcaaacgattcccacggattaagaagattgatcccgaacaagtgacgaccaaagaatatcgtgtgcgttatttcgatattgatggtaatcaacacgttaataacgtccattattttgaatggatgttggatgcgctcgattatgacttcttgacgacgcaccgcgtagcaagtatcaacatccgctacggccacgaaattcaatacggtcaaatgacccaaagcatggtcgaacaactcatagttgatgatataatcacaacacggcataaagtcgccgtggatgacctaagtgcagcagaagcagagattacgtggaaagagtgctgagtcgaacgggttggctttgaggattaacgggataattgggattatggcgggtcttagccataatcccaattattcagttaaccggaaaaggcagttcgaggaagcgcgtttaaacgaaagaaagccccattcacagataaagttgtgatggggctttcttttgttatcttcgaatatttattgaaacgtgctttttgaaacagctccctgcgcttaacccaagttaccaaatcggcgatttcatcgccaattcggcaaatccagttaatgctcagaagctaaccgtttcaaacgcactctatcgaaaacgtgttttcatcaacagcttcctgcgctttgctacacttatcaaatcggcgcttacagcgtcaattcgctaagttaggcaagtgctcagaagctaaccgttgatgacgcactctatgatgttgcgttgctgacaaattcttttaatgctgcgcctgttttgcctgcgctgaggccgacttgtagtttgaggcgtgcttttggtccattgaggccttggcagaaggtgacgcccatttgtttaagctttacaccgccgccttggtaatcgtagacgtcttcggcaatcccgttgaaacagcgagaaacaagtacgatggggatgttgcgatctaatagcgcttgaacagcgggtaaggttgctggtggtaagttaccagccccgagtgcttcgataacgagccctttggtgttgggttggttgatggcgtcgaataaagtcccatccatgccagcgtatgcttttaaaagataaacaggttcgacaagggttttgatgtcgcaaatttcagaacgaattaattcttggaagaaattcgcattgtgtttgctgaccaaaccgatgggaccaaaagttggcgttctaaaggttgcgacgttcgtcgtgtgcgtcttcgtgacataccgtgctgtgtgaatctcatcgttcatcacgactagcacacctttatcatgagcatcgtcagaagcggctgtccaaacggcactaatcaagttgtgtaatccgtctgcgccgatttcattcgacgagcgcatcgcaccagtcacgacgacggggatattgttgggaagtgtcaagtctaagaaataggcggtctcttcgagggtatccgtcccgtgtgtgacaacaacaccatcaatcccgtcttcttcagcttgttgaattcgattcttaaggtttaacatcacagcgggtgtgatgtgtggtgaaggcagattggcgaactcttcactttcaatgattaattgattatcgaacagcttttcaaagccggccattggattttgatctgtgggtgcaaccgcgccatcttcgtccgcagacattgcgattgtgccaccagtatggaggactaaaattttcttcatgtttaatgaacacctttctttaaatccgaattactcatctgtaagtatagcaaattttctgcaagagttgctgaaaaatgaaaatcaattgcttgtaattaaataacgttagtgatacatttaaggggttctaaaaattcggagtaggactgaagcgttaagtgctggtggaacggaatgtggacaccagacgaaaagcagcaatgcttgcgatttcagtaccgcattcgccgcagtattatttgtggcagctccaaaagggagatgctttttatggttaatggtcagatttttggtgttaagctagacactagacgcgttgttttactagctgttttaattgctttacaattggtggttgcacgctttgcaatttcactaacgattttcagaattagttttggattcatcgtcaccgccttaatggggtggtggtttggcccagtttgggcgggacttgccgccgttattggcgacctcatcaatagtttgatgattggggtcccaggtggttatttcccaggcttcacactttcagcgtttctaggggctttcatctatgggtgttacttctaccgacaaaagattacatggtggcgcgtgattgccgccgttgtgacagttgtgctgatcgttaacctcggtttgaattcatggtgggtgtcgattattagtcatacaccatttgggttccactttacggcgcgggccattggggaagctgccacattagtgattcatccgattattctatacatcgtgatgcatttcgaaccgattattagattaaaagatagagtattataaatgagtaggtgttatctatttgaagataacgcctttttttgtggaaaccggctttttatgctagaataacaaggattataagcagaagaaggatgaaataatgaagctattggcaatggatacctcgaatcaagcggtgagtgtggcactccttgaagatcatcaaattttaggcgaaatgactgttaatattcgtcaaacacatagtcagacgttacttccaatgattgatcaactattaaaacaaacaaaaaccaccattgaagatatcgatcgctttgtcgttgcagaaggtccgggttcatacacgggattgcggattgcggtgacaacggctaagtcttttgcttggacgcttaataagtcattggtcgggatttcgagtttagcattgctagcggccaatgtgatggatacgaccgccttgattgtaccgctgtttgatgcacgccgcgacaatgttttcgcggggatttatcagtggcaaaatgggacattgcaaaccgttgtggccgatcaacacgtttcactagaagcactactggcacaattacaattattggcagaacctgtttattttgtggggaatgacgttgcacactttaacgaacagattcaagctgcattaggtagtaacgcgcatttcgtgtccgccaaccataatttaccgcacgccagcgtcttgggtgaattaggcttgatggctgaacctgtcgcggatatccatggcttcggacccgtttatttacgcaagacggaagcagaagttaactgggcaaaaacgcatgatgagcgaggcgctgattcgtatgtggaacaagtttagggaatacctcaaaccccagatttgggtcaagaaagaaatgccttacacaactcggcgcgttgaaattgatgagacgacattttacttagcacgcgcgagtcaaaatgatattacggcattgttggacattgaacggtcggtctatgccggtcagacgccgtgggatcgttggaccttcactagtgagttgagcaagcgcaagacatcgttgtatctggttttatgccaagggactgaagtcgtagcgtttgtcggtgcatggttttcaaccaatgaagctcatattacgaatatcgcggtgcggccaagttatcaaaaacgtggtattggccactttttggtgcacgaaatggttagtttagcccacgattatcccagtcaaaaaattacactagaagtacgcgccagcaacacaagcgctcaagccgtttatcagcgattgggttttacagtggtgcggacgcgtcccaattattacattcaggaaaaagaagatgcattcagtatgtgtcggatattgagtcaataggagtcagtcatgtcggaaaaacgagaattaattttagcatttgaatccagttgtgatgaaacgagtgtggccgtcatcgaagacggtcatgttattttaagcaacatcattgctacccaaattaagagtcatcaacgttttggtggggtggtacccgaagtggccagtcgccatcacgttgaacaaatcacagtttgtacacaagcggctttagaagaggccggggttacttacgctgatttaacggcggtcgcagtcacttatgggcctggattagtcggcgccttattaattggcgtgacagctgccaaagcgattgcttacgcacaccacttaccattgattccagtcaatcatatggcggggcatatttatgcggcgcggtttgttaagcctttagaatacccattgttagctttactggtttcaggtggccatactgaattggtgtacatgccagccgccggcgaattcgaaattatcggtgatacacgggatgacgcagcaggtgaagcctacgataaaattggtcgcgtcctcgggattcaatacccagccggtaaagaaatcgatcggcttgcccacttaggtcaagatacatttaaattcccgcgtgcgatgctcaaggaagataatcttgacttcagctttagtggtttgaagagtgccttcattaacacagtgcaccatgccgatcaaatcggtgagacgctgaaccacgaagacttagccgctagtttccaagcgagtgtggtcgaagtgctcaccactaaaacgatgcacgccgcgcgtcaattaaacgtgcgccaactcgttgtggccggtggggtggctgccaatcaaggtttacgtgaaggtttggcgacagccattaaggcatccggaatggatttagacctcatcatgccaccacttcgattatgcggcgataacggcgccatgatcggggccgcagcgcatatcgaattacaaaaacaacaatttgctgatctaagtttaaatgcagtccctggtttggattttccatacggtgcataaaatacgaattcaaaaagcctgtcgataatttcgacaggcttttttgcttaaatggattgcttagttgattgtaaggtagtatagatgtccgtcggcagtgccactatcaacggactgagctgatccacgccaatcagtgttaaatcgtgcatagcacgtgtgacgagtgtgtagaggagatctacgtctgattgtgcgccgaaggtcttcttagagatgtcgtagccaatcacagcgtcgaactcgagccctttggctaaatataatggaaggattaggatgcctttgggtaaactacgggttgtttcaccgatgagtgtgacgtgttcatcaggtgttaaactagcgtagagttggtgggcaacttgttggttcttggtgaggatcgcaacggtcgcgtgttctgcctggagatggcggatttcttgggtcagtgtagcgagcgcttggtcgtttggcgtctcaatgacgcgcggtaggcgcccgtcacggctgaaggcttggagggctgtttcttttggcaagagtgccttggcgaagttggtgattggggcggtcgcgcggtaactcttggttaagctaatttggttgatttttaagcggggaaaagcagcggtcagttgatcgatgaagtggccggtttggtaggtcgccgtgaagacatcctgtgcgtaatcgccgagcacggttaatttcgcgttgggaaaggcgtggtggatgtagacgaactgagcgatgctgtaatcctgcatttcatcgatgaagaggtactgaatgccgtgattttggccgctgtcagttaataagtcgcgcaggtatagaattggggcggcgtcactgagcccgacgatgtggcgttcattgttatccgcgacttggcgaatcatggcgtcccaaaccttcgtagggatgtcggcagggcaagcaccacttaagaagtgttgatattctgtggattcatctaggaaataatcattgtagattgattcatagagtggggcgaaataactttgaacgatttcacgagcgatgaaagcttgttcatcatcgccagaatcgaattcgcggtcaccgacaatcgtccggtaagcatcatcggttaaggtatcgattttttcagcgacccagtcgagatgaacttcgaggttgatttggcgtttaagccgtttgatgagcgtgtttttagtggcgaggaatttgtcgccgggtaacatatttgcggggagcgcgagataaatctgattcatctggtctttagtaaaaaatgggcggtcttcgaagtatagatcgttgaatgccaacggttgggttgaggcttgtttaacgtaagcttcaattgcgtgcatgaacgctgcgctttctttataccggcgcatggcttgtgtcatttcaggaaaactggcttgatctttttcgaagcggtcgaagaggttctcaacctgtaagcctgagaagcgatgacttaagaactcggccatcgtcacttggcgcatgtttttctcgcctaaactaggcaggacttctgaaatataatggctgaataaacggttgggtgagaagagcaccatttggtcggcttcgagctgactgcggctgtgatagagtaaaaaggcgatgcgttgcaagacagctgaggttttaccactaccggcgaccccttggacaatcagtaagtcagcggttgtatcgcgaatgatatcattttgttctttttgaatcgtggcaacgatgttttgcatgtattcgtcactttgttcaccgaggacggcttgtaagagttcatcgccgacagtttcgttcgtatcaaagacgtgttcgatttgaccgttttgaatcttgaattggcgtttgagtttgaggtcaactttgacagggccatttggcgtctcataagtcactggaccgagtgtcccattatagtagatactcgaaacaggggcgcgccagtcgtagattaagaaattgtcttggtcgtcgataaaagtggcggtcccgatgtagagtgattccgtttcaccatcttcggtgatgtcaatccgaccgaagtaaggggagttgacgagatcggtcaggcgttcttgttggctagtcagtaatttttcgttttcgacagcggcggcgaccaattgcttttgttgttggaccgcggcgttggtttccatgcggtcatcgacttcggtaatgttgactttcgtattgtcgccgtaacgttgttcgatgtctttggtttcattgtaggcgttggccaattgttggttaatcactgtgaggcgttggtcgacctgtataactgtgcggtcaacgcgcgcttgttcttgttgttttgtgtcttcgtgtaacatagcagcctccaattgttagttgttatattataagcgtcttggggtaaaaaagcgaccgattgacattcattttaaaatccgttagtatgacagtaattcaacagacaaagtgaaggataagtagcaactgatattttcttgaacaggaagcggcgggactgagaagtcgtcaaggagttggttgtgaattgggccttcaatcgggaattagtgagtaactaattcgggtagcacccttatcgcgtgagtggcacggatgattttcgtgcaatttaggtggtaccacgtagaggcgtcctaattgtttaatcacaattaggacgctttttttgagttgataaatcaaattggagggtattattatgaacaaaaaaattatcttaaccggcgatcgaccaaccggtaaattacacattgggcattacattggttcattacgcaaccgggtagcgatgcaagattcaggcgaatacgaaacatttatcatgattgccgatcaacaagctttaaccgataatgcgcgtgatcctgaaaaaatccggaacagtctcttccaagtggctttggattatttatcagttgggattgatcccgctaaaacaaccgtcttcgtgcaatcacaaattcctgctttgagtgaattaacgatgcattatttgaaccttgtgacggtttcgcgtttacaacgcaatccaaccgttaaagctgaaatccaacaaaagaattttgaacaaagtattccagcgggctttttaatttatccagtcagccaagctgctgatatcacggcgttcaaagcaacgacagttcctgttggtgatgatcaagaaccaatgttggaacaaacccgtgaaatcgtacggacgtttaacaacgtttacggacaagaaattttagctgaaccagaaggggtcttcccaccaaaaggcgaaggacgcctacctggtttagatgggaacgccaagatgagtaagtcattaggcaatgcgatttacctatcagacgatgcccaaacgcttgaaaagaaagtgatgtcaatgtacactgatccattgcatatcaaagtaaccgatcctggtcacattgaaggcaacacagtctttacctatttagatgccttcgatgatgatcgtgaaaaagtggctgaactcaaagcgcaatatcaagctggtggtttgggtgatgtgaagatcaaacgttacttgaacgaagtcttacaagcgaagttcgcacccattcgtgaacgtcgtgctgaatttgaaaagaatccagaagccgtttataagatgttagaagaaggtagcaagaaggccaatgctgttgcagaacaaacccttaaagaagtgcgggatgcaatggggattaattactttaactaatcctattcaaattaaaaaaacagttaaacaagtcgctgaatgacttgtttaactgtttttttatagactaatatagtgggataatagatgctttttgatggtactttaaagttgaatatgagagacttaactcaatttaagacagatgtaaacgctgtttttggtgtataatttgagaagttatcaacatggagcaaaggagaattgatatgcatgatttaactaaaggtaatccgttgaaattaattatcttatttaccggcccattattgattgggaatatttttcagcaactctatagtgtcatcgataccttaatcgttgggcggacaattggtgttaatgcgttagcagcagttggctcaacgggtggattgaacatgctgattatcggtttttgtacagggaccacggctgggttgtccatcttgacagcccaacgctatggtgctcaagactatcgcggcgttaagcgcagctttgcgacgagcattctgattagtttggtgataaccatcattttgacagttattagtctattatttgctcgacatattttggtcatgatgaagacgccggccagcatcattgttgatgctcaacggtttattatgattatctttggtgggatttttgcctcgatggcgtttaacttactttcgaatatcattcgcgcacttggggatagtcgaacccccctctttttcttagtaattggggtcattgtgaatattgtgttagattttatttttattttaggctttcatatgggcgttgaaggggccgggtttgcgacggtctctgcacaaataattgcggctgtgttatgcttactatatatttatcgccgcattccggtcctcgttttacggccgaaggattttcgcgtgacgcgcaaagatgtcatggatcatctcaaggttggattgccgatgggctttcaatcgtcaattattgcaattggctcaatcgtgatccaaatcatgttgaatacattgggtgctagcgcggttgctgcttacacagcggctgggaagattgatcaattagcaactcaagttgggaattcatttgggattaccttggcgacatattccgcacaaaattacggtgcacgtgaatttggacgaatcagtaaaggggtccgccagacactaatggtgtcaatcatctttagtttagtgatgggcgcgttgatcattgcctttggacgaccactggttaacctgtttatcgggaacaatcaaccgtacgtgacggatttagcacaaatctacttccgctttaacagtagttgttactttattttggcaatcttatttgccattcgctacaccttgcaaggtttggggcagagctttattccaaccttagcggggattgcggagttgttcatgcggatttttgccgggatcttcctcgtgcagcaattcggcttcatgggcgcaagtttagccaacccactcgcttggattggttcatgtttggtgctattgagttcctatttcaagacaatgcaccaactgaagcgtcgtgaagcaggtaagaatagggaggaacaggatgtttaaaaagtatttattggtcggcttatcgttgaccatgttggcgttgggtggctgtcaggcgacacaatctagtcaaccaacgcacgagaatgcaccaacaattgcaaataaaaaacaagttaaaaaaacaacggcaatcttggctgagaagacctttaagtcaggcgacaatgcctatttagaagtgaaccataataaatcaacgttggatgtccgtcaatggcaaaccgaacggatcaagtatggtgcgttggatggtttaaatcggacaacgactaatacggctttcttatcgaaagagacgttaggccgttcaaacacacgccatcgtcaaacgtggcaaccaaccggctggcataatcaacccgtgatgattgatggccaacgggtctttcctgaaagtcgcggccatttgattgcatacgcgatttcgtttaatttcaaccgagatggtgttttccaaaaaggggaactcggcagtagcaataatccgaagaacttagcgacacaaacggtcttcagcaatcaacgtaccatgcagatttttgaagaccaggttcgccaagcactaacgcaaaataaaaaggtgatttaccaagtgacaactgtgttccgtggagatgaattgatgccccgcggttactgggttcaagcaatctcaacagataagaagttgaactttaatgcgtatgtttggaatgtacaacctaagatgcaatttgactatgcaaccggtcgcggccattacgatggatcgatggcggtggtggatcagtatgcaggcaatccttatcagaattaagtagaaccaaaaaaagcgccgtctcaagattaattgagacggcgctttttttgcttaatgcacaattactacttacttagaaactaaccgttttaaacgtactttaaacatgcttcgatagccataaccttccggttcactacacaacaaaaatcatggccggaaaccaccataattcctggtgataggctaatcttcaagtgataaacggctatctcagcactttatggcaggtcattgcctgctgccaagtataggtcgtaccattctcttctggtgagggtgactttgcctgcttcgcagatttgtgctaggcggccggggttcattgtgccgacaacgacttgcatgctggctggaattctgaggagccatgcgctagcaattgcgttgacgttggtgtcatgtgccttggcaactgattggagtgctgcgtttaattctggaaatttcggattatcgatgaagaccccttcaaacatgccgtattgataaggactccatgcttgaatggtcatattcgtgaggcgtgagtattctaataaaccaccatcgtgatgaatgctgcgcgcgtcttgcatattggtatgcacgccggcatcaatcataccagtgtgcatcaaactgaattggagttgattagcaatcaatgcttgcggcactgcttgttggagtaagtcgacttgaccgggattgaagttgctgaccccgaattggcggactttaccactattttgcaattttaagaaggcttcagcgatttcatccggttccatgagtggatcaggtcggtggagcagtaaggtgtcaacatgatcaagttgtaatcggttgaggctggcttcaacaccttcgatgatgtgttcctttgaaaagtcgtacatttttttgccaatgccgactttggtttgaacgagcacttgatcacggtcaatatgactggccttaagggcgttcccgaatttaatttcggaagcaccatcgccgtaaatatcagcgttatcaaagtaattaatcccatgttcataggcggtttcgagcattgtcagggcttcttggtcgctcagttgtgggatgcgcatgacaccccagacaattggcgaagccattaagccgctgccaccaacattgattttttgcactatcaatcactccttttatttgatgcttttaacctaccacaaagtaccattaatgaaaagaaaaggctttcctgaatttcaggtcgtcactggcgacaattttcggtatactaatcacaatagacaggagacagttagatgacagataagaaagcacaggcaccgcggctaaatccacaacttgagacggtacagcttactgcgtttgaaccagatgagacttatgaaggtttgtttttcgaagaactaacgttgaagcaaaccgaagttgagatgttattctttaaaggctgtttatttaaaaattgtcagtttgaacaagtcgactttaataactgtgattttcaagatgtgcaattcgaacactgcgcgttgttaaactgttcgttgacgaatgctcccttccaacgagtcgcgtttaatggttgccagttgattggttccgattttgcagaggctggtctgaatgatgtcacgttcgacacttgccaagcggattacaccggctttaactttgcgcggatgcggcatgtcgactttaaagattgcagtatgcaagaagtctcactcgggcaagttgattggcagtggctaacaatgatcgggaatcgtttgaacggcatggatatgactggcacgaatttgaagaatctcgatatcagtcagaatcaattcgaaaaagcgactttcacgctcgaattattacgtggggcgaccatcagcacagaacagacgctcgtgattatgagcgcgttgcgaattaacgtccgctagcttgccggtttttaaaggcaattatcagacaactgattgttgcgatgagcatcacaagcacagcgaagaaatcttggtgcaacagctggcagaggccgctgatacataaagcgatgaataaaataagtgggattttaaggttggctttcattggtcattcccccgtactttaatctgaaaaggcagcgacaaaatattgtggctgccttttcgtttgatttttaataattaatcttgtatgtcaattcaacaaaatgaccgatttgacggctattgataagttccaatggcatatcggttaagtgcgtgctgaccagtgaaatgccgtcacccaggagaactggcgcaatggtgatgatgagttcatcgactaactgggctttaagcaattcggtaaagatttctgcaccacccacaagccagatattgccaccatcttctttttttaattgacgcatgaactcaggaatattcccagcaacgacatgtgttcgatcttctgtatcatgtaacgttttcgagaagacatagccgtttttatcttggtaaggataggtgccggctaatttaagactttgttcatatgtcttacgccccatcacaacggtatcgacggtgcgttggaaagcttgaattgcagcgtctgattcggatgaatcgagtgcagctaaccaagcagtgctaccatctttttcagcgatgaagccatctagactctgagcaaggtataaaattacttttcgcgaatttggttctgtcatagtcaacacgtcctttaaattaagattacctttattataacagttttaaccgctttcatacattctaaaccgttggtaatttaactggatttggcttatcatgaaaagcaaagctgtttactcaaaggagaccaaaaatgacaactactgaattttccccagaaatccaaagtttaattgaccaagttcaaaagaattatcctcaacccattaagatccgggtcgcagacgcagcgtctgggatgttaaaacatgatcaggcacaacgcgttttaaataacgatggcagcttggcaatcttaattaccgatgcgacagcggctgattatgctctatcacacgaattattgcacttactattattatcaatcggttttccacaaatcatgaccgatgtcaccacgcaggatgcgcaacttgatgaacaattggttgcgaccggcacaactttgtacaatgccgctgtgcacatggtgattcaaaaagaacaagaatcccatggctttgtggatgttgaaactaaacaagcctaccttgaaggtctacgagataatctgaccccggaaaaagacgatcccgaaaatagatgggtgattttccgcgtattaacgctgttagatgccctcgtcttctttgatggtggcaaccaacaactgttaaaacagtggacggctgattatccgattgcgtttgcccaagccgaaattctctatcatgtgttggcacgcaaaacaattgattcaccattcacattacggcgggctgtgattaacttgtgggttgcgtttgatcgcgtgttatcaaccctaggatttgctgaaacgaacctccaacaactcttgacattaacgccggtattaagtgaacggcaactacgattagaagtgcgccaagtctacgatattttacattccgaaaatctatttgcgaccgcaatgaaccaaaaagcgtatgttggaattggtaagagtgatcaacaaaatgcttttgtcttagggattccagaagacaaggcaacaccggaatatttcaaacgattgtatgatttatcagtgcaaaccttcttagatgaaattggaatgccgtattcattaagaaaatgagtgcgttcaagctggtcaacttttgagcattagcacagggaagcgaattagcgacgcagtcgatgatttgattcacagtgctaagcacagaaagttagcttgaaaagcacgttaaagaacagagtgcgttaattcgcggttagcttttgagcacttgcctaatcagacggataagcgccaaaggcgattggccgactgatgtagcaaagcgcagaaagctgcgaattaaaagcacgttaaaaaggagtgatggtgatgacttttaaatcaatgttgcatgcggcacagcatgttgttttcttgacgggtgcgggcgtgtcaacggcttctggcattccagattatcgatcgaaaacggggttgtatcatcagcaagccaatccagaatatttattaagtcacacgaatttaatcaccaatccagccagtttttatgaatttgtcacgcagcagatgtattttcctgaagcaaaccccaatgtcattcaccaagtgatggcgacgattgcgaatcaaaaggggcagattatcacccaaaatgttgatgggttgcacacaaaagcaggcgcgcgggatgtgattgaatttcatggtagtttataccgtgtcagctgccaaaagtgtggccaatcagtgccttatcaggcctatttaaaggatatgcatcatcaagattgtggtgggattttgcgaccaaatatcgttttatatgaagaaccgattgatccgacggtgattgaacggtcgattcaggcgattgaagcggcggatttaattgtcgtggtcgggacgtcatttcgtgtgtacccatttgcgagtttaattgaatatcgccgtccagatgcccaattagtagcgattaatcaagaggcattacaatttgaaatgccagtcactatgatacaagcggatgcgacaaccgtttttgccgcactagcaactaaggagtgagcccatgttaactgaacactatcaaaaaattgatgcaattgatgcccaattggcggttttatttgaagaacgcatgcaagtcaccaagcaaattgcaacaatcaagcatgaacaaaaaatcggcttgacggacatccaacgcgaaaaagcggtgatggatgcgcgccttgctgcggttaaagatccagcactcgcagattacgtaagggatttataccaaacgttaattttaatttcgaaacaatatcaagtaaaattgatgaaggcgatgaaagaagcagaagaaaaataatgtggaaagagcgaaacggagacggagcgctcttttttgattgaaacgtgccgattcgaactgccttttccggttaacctaaaaatggcaatcatggctgaagagcgccataatccccatttttttgttaatcctcaaagccaacccgttcgactcagacactctaaacgtgccgagtctgctatatctttccggttagctatgtatcgcaaacaatcgacttcgtcgctcattcacgatgcgctgctaatcatcaagatataaccggcagattcagcactctgatttgaaacgtgccgattcgaactgccttttccggttaacctaaaaagggaaatcatggctgaagggcgccataatccctattttttgttaatcctcaaagccaacccgtttgactcagacactctaaacgtgcttcctgtcgcagtaatttccgcttaatctaaaaatggtattaatcctaaacccctggattaataccatttttgaattaatgctcaattgctaaccgcgacagtcagcactcttttgcttaatatgctaaaatgaaactaatttatgagatgtgaggctattgaactgtgactaaacgacgctataatttagcggtaattcgctatcgcgggactttactattattgaatcggattaagcccccatttgctgggctttggaatggcattggtggtaaaacagaaactgatgagacgccaatcagtggtatgcaacgggagttatttgaagaaacgggtttacaaaccaaccaatacacactccaaaatgcggggtggattgattggcacatcgatggtgaaccgattgcaccgattgacatttttttagtcgatattttaccaacggtgcaactaccactttatccggtcggaatgcgcgaaggcgtgcttcaattatttgaaccagaatgggcacaagctgctgataatcaaggaattgtggcagacttacaggccattttaccaactgttttaagcggtcagctcaatcggtatgacacggattttcatgcagatcagatgattttctttgaagcaattcccattactgaaccaagagaaggagaggaagcactatgatgacaaaggaccaaacgatgatggtcttgatggttttaaagaagaagttgcaagggattcgtttttttagagtcgtcgaagaactgttctcgttatacattatttttaaattcttaactgcaacgggcaaggtacagcttttaggggtggcgttttctgaggggcgcgccattagcttaatgttgctgctgctagtcatcgactttagcctatcgcggattcggttaaattataaacgcatgggacaacaattaattgtcacattgaaggatttaacggaacaagaagctttgttcattcaacaattccaacggttctagaggtgtggatatgataacaattggattaactacttggtcagaacatcagtcattaatgcccagcaaaaagcagttaacattaaacgactacgcgcaatttctgccagtggtggaggtcgatagtttttattacggcttacgcgcaccaaccgtcagcgcaaactggttgacgcaagtaccagccagttttcagttcattgttaaagcacaccaagcaatgacccgccaagaagactacgccgagtttacgagtactgaaaaagaattgtttgtgcggtatcgccaatcaattgaaccgctaattaaggccggccaattacaggcggtcttatttcagtttccgccattttttcaactgaatcaggaaaatagtcaatatttacgacaaattcgcgcgtggttaccggatgtgccaattgctgtcgaattccggcatcaatcctggtacgatgacgcttttaagcaacagatgtacgcctttttgaagcagctaaacatgacacacgtcatcacagacgaagcacaaacaccgacgaacagtgtgccgtttgaaccggttgtcaccaatccggcgtttgcgatgttgcgcctgcatggtcgtaatatggccgggtggcagaatccgggtgcccaatggcggaagcaacgaacattgtatcgctatgatcaagatgaattacaattttttgcggatgctgtgcggcagattaaaaatcaagcggaacaagttgccgtgatttttaacaataattctggtggggatgctgcggataatgctttgcaattacaacaattacttgggctagaatttcctgatttagccccgaaagcgcctgaacagattgatttattttaatgaaggcttagtgtgagttgtcgtttaaatgactgctcttttgtgctatactttgattacttatatggcattatttaagcaagtcgagaattgttaagattctcgtttttttaattaaggagcgaacctaatggcagagacaaaaccaacattttacgtaacgaccccaatctattatccatctggtaaattaacgattggtaactcatatacaacaatcgccgccgatgtcatcgcgcgttataaacgcttgatgggctttgatgtcttcttcttgacggggacggacgaacacggcttgaaactcgaacaaaaagcagctgaaaagcatttagccccacaagaatatgttgatggcatggctaaagacatcaaggcattatggcaaactcttgaaatttcaaatgacaaatttattcggacaacggatgaataccatgtcaaagcggttcaaaaaatcttcgacaagttattagcgcaaggcgatatctatcttggtaaatacgaaggttggtattctgtttctgatgaagaatacttcactgaatcacaattagcagaagtttataaagacgacgatggcaatgtgatcggtgggaaagccccatctggtcatgaagttcaacgggtcgctgaagaaacttacaagtttaagatgagcaagtatgctgatcgcttattggcttattatgaagaacacccagatttcatcgaaccggcgtcacggcgtaatgaaatgatcaataacttcatcaaacctggtttggaagacttatcggtttctcgaatctcatttgactggggaattcacgtttcaagtaatccgaagcacgtggtttacgtgtggttagatgcgttatcaaactatatcacagcgcttgggtacggttcagacaacgacgaattgtttaataaatactggcctgctgatgtgcatctagttgggaaagaaatcgtacgattccatacgatttattggccaatcttcttgatggctctagacttgccattaccaaaacaaatttttggtcatggttggttgttgatgaaagacggtaaaatgtctaaatcaaaaggcaacgtagtttatcctgaaatgttagtggaacgttatggtctagatgctttacgttactatttaatgcgcgcgattccatttggtaatgatgggacatttacaccggaagactttgtcagccggattaactacgatcttgccaacgacttaggaaacttgttgaaccggaccattgcgatgattaacaagtacgacaatggcgctgtgccagcttaccaagctgacgtgacaccgtttgatgctgacttacaaaagacagccgcacaaaccatcgaacaatataccagcttaatggatcaattgaagttctctgatgccttagataccgtttggcaattaatcagccgggcgaataagtacatcgatgaaacagaaccatgggtcttggcaaaagatgacagccgcaaagcggaactcgatagtgtcttagcccacttggctgagagtttacggattgttgcgctcttattacaacctgtgatgacgcatgcaccacgtgatatgtttgcacaattagggcttgatttcgatcaagttgcgcaacgtgaattggtttatgggacattcccagccaatattcaagtggttgctaaagggaccccaatcttcccacgtttagacttggatgaagaagtcgcatatattaaggatcaaatgggtcaagcgcaaaaagcgggcttagtgaacgaaaaagtgaaggctaagcaacaagcagctgaagccaaagctgaattcgatccaaaagcaacaacattagtcagtgaaaaggacgccatcaagtttgaagatttcgatcaaaccgaaattcgcgttgctgaaattaaggcagttgccaaggttgaaggcgctgataaactattgaaattccgtctagatgctggggatcaaggtgatcgccaaatcgtttccggcattgctgaattctatccagactatgaagcgttagtcggtaagaaagtcttagccgtcacgaacttgaaaccacgtaaattgcgtggcgaattgagccaagggatgttgttatcagcagaacatgacggacaagttgaattagcagttgtgccaaacaacttggtgaacggctcacaaatcggttaatttaaaataacagaaacgtcaaaagggctaaaaggcatttacattctgtaggccttttagcctttttaatggaaaagagtgtgttgccagtggttagcttttgagcatttgtctaacttggcgaattggcgatggaatcgccggtttgaaagtgtaacaaagcacagaaagctactggcaagagcacgttttaactgtcagaatgaggacactaaaaggagattgaaatgcaaatttttgattcacatacgcatttgaatgataccccatatgcagggcaagaagctgattttatcgcgcaagccgctgaactcggtgttgttgaaatggcgattgttggttcagatacagtattaaatgagggcgctttgcgcttagcagcgcaatatgaacctttatcagccattatcggttggcaccctgaatcagccaaagattatcacaaggcagaagaaaccgtgctgattgaccaattacaacgaccagaagtagtggcgctaggtgaaattggtttggattatcattgggatacttcgccacgcgatgtgcaacaaaccgtttttgcacggcaaatcgagattgctaaatccttgcatatgccaatttcagtgcacacgcgggacgcgttagaagatacgtacaagattctaaaagaaacagatgtccgtgattgtggggggattatccacagttttaatggcgatgttgaatggatgaaacggtttatggatcttggtatgcagatttcgttcagcggtgtggtcagttttaaaaatgcgcatgaagtccatgaagcagctaaagcatgtccattggacgtgatgttggttgaaacggacgcaccttatttaacgccgacgccttatcgtggtaagcagaatcaaccaggctacacacggtatgtggtagaagcgattgctaaactcagagatgtggcaccagaagaaattgcggcagcgacgtatgcgaatgcccaccggatttttaagttaggagcactatgaaaaaaacaattcaagaagtgattgttgttgaagggcgcgacgatacgaagcggttacgggaagttttcccagatgtttcgacaatcgaaacgcgcggttcagcaatcaatgaagaaattatcgaaaaaattgcgctcgctcaagaaaaacgcggggtcattgtctttaccgatcccgattttcatggcgagaagattcgtaaaatcatctctcaaaatgtaccgggcgtcgaacacgcctttttaccacggacagaagcacgtccggaaaaagcaggcggcagtttaggcattgaacacgcaaaaccagcggcgattgtccaagcacttgagcatctattaacacaagatgaagaagcagacgaacaaatcagtcaatcggatttattaacggcgggcttgattgcgggggctgattcaaagcgacggcgcgaattactcggcgaaattttgcacattggttacaccaacagcaaacaactttacaagcgtctcaagatgttccaagtgacgcaagctgaatttggcgctgcactattacaaattaaacaggaattaggagattaatatggaagatattgcaaatcccgagcgtacccggaaaattctcaaacgttacggctttaagtttaaaaagagcttaggccaaaacttcttaaccaacatcgccattttgaaacaaattgttgaagctggtgatatcaccaaagatgacgatgtgattgaaatcggccccgggatcggttctttaacggaacaaattgccagaaaagcgcatcaagtattaagttttgaaattgatgaacggttaatgccggtcttaaaagatactttgaatcactaccataacgtcacgattttaaaccaagatattcttgaagcggatttaaaaacgattatcgccgaacaatttaatggtaagcataatctcaaaatcgttgcgaacttaccctactacatcacaacgccgattatgttgcacttactagaagcaggcttgccaattgatcgcatggtcttaatgatgcaaaaggaagtggcagaacgaatcaacgctgaaccaggttcaaaggcttacggctcattaagtatcgccgttcaacttcattcagaagtgaacttagcctttattgtgcccaagacagcctttatgccacaaccgaatgttgattcagcgattgttgaattagtggggcgcaaagcaccacttgtaacggttgataatcaaaccttatttgatcaattggttcgtggcgcatttgcacaacgccgaaagacattatggaataacttgcaaaatcaatttggtaaacaagatgaagtcaaagcagctttaacaacagccttagaagcagtcgagattgcaccgagcgctcgtgctgaacaattgagtatccaacaatttgcccaattaagcgatgcgctgaataatcagccaatttttgctaaaaaagctaagtaagtaattgccaaatcgttggtacaatggtataattgcaaatttttcgtttatatggtatactatccctcgaagaggtgaagcataatgccaaccacacttgccaatattaagaacggtctcgatgggcatatcggagacaagttaatggttgtcgctcaagctgggcgcaaaaaagttacaaagcgaaagggaattcttaaagaaacctttccagcagtatttgtagtcgatttagatcaggatgaaaatgcttttgaacgtgtttcatacagctatgctgatttgttaacgaaatcgattgagattgagtttgatgaagaaccaattgtcctatagtttaaaatagaagaatagagtagcactcaaccaactggttgagtgctttttttgttcaaaaagcagattgacgaatcgccatatacttcacgtggttgattagttgttgacattcgtttgataaaacaatatcatatagaatgtttatgacgtatataaaagggagaaagaatatgtttggcaattggaaagagaacaaagtgaagttaggtgggttcattattatggtctgcttaattccgattttactattactaatcacatttaattttattaagtacgaacagaccactaatattaaacatatgaaagtcgcggttgtgaatcaagatcaatccgcaacatttaaaggggaaaaggtggcagttgggcaacaggtactaaaaacgttgcgtaatgatcaccaggttgattggcaatttgtcagtgctaaggatgcaaaagcgaacttagctagcggccgatacgcgatgcaggttgtcttaccgaaagacttttctaaaaatgcgacaaccgcgttagataagtcacctaaagtcagcttgttaaaagttgaaacgtctaagaaaaataactacatggccggcatgattacaacccaagtcgtgaaccaaatgaagggcagtgtcgttcaaaaaattcaagaagcttataatcaagccttgcttggtgcaatcggcacgctaggcagtggcgtacaagaagctagcaatggcgttaaaaagttaaacacagcagccggtcaattatcaaatgggagccaacaaatctatgataatttaaatgtgttgcatagtgggacacaacaattggcagatggtagtgcgccattggcaagtggcgtgcaacaattaacaactggtgctgggcaactttcggctgggcttggagattatacagctggcgccggtcaaattaatgccggtttaaaccaactagcagccaataaccaaacaattttagctggtggccaacaaatcagtggcggtgtcgaccaattagctgatggcactaagcagttgagtgcaaaactaactgaagcagccgatggaattgaatccagtttagatggtaatcaagaccaattaacacaattgaaagctggtttaggcgctttaaatgctggtattcaagagttagatcaaaaagtgaatcattccaataatgataattccgaaattatcaaagcagacttattaaagattgcggataatacaaaaaatacaggggcacttttacaggatagtggtgcgaatttaagtcagattaacgataaagtgtacaatactgctaaacctgatagtgttgcaaacagtttacaagatgcaggaaatcaactaaaagccttacaagatttagcggtaactaacggtaagtttgcaaagtttttaattcagaatccaactattttgaaagcgttgctggatattggagatgcagcaaaagcagacttgctgaatgctggcagtcagttagagtcttctggcacgaacatgaaggctattcaagccaacttaggcacgatgggcagcaacatgagtgatactggtgttcaactacaggctgtttcagatgaattaacaaaaacggctgataacatggcacaactaaaagccggaatcgcgaagatggcaagccaagaccaagcgccgttagcactaaatggtgctactcaggcgattgatacactgacagcggggttagccaaagtcgacactgggttgaaacaaaaaggaaatacgacctatacaatgggcggaattcaagctgctgacatgattcatgccggcttggttcagattcaagatggtctaaaagggaaagctggtcaacttggtttaatgtcaggcttaacgacttatctgaatggtgtttcgactgcagctgcggggagcaatcaattagtcgcgaataacaacaagcttaatgccggcggacaacagctaacaaatggtctacaagaattaaaccaaaaagcaccaacgcttgtttctggcattacacaaattaacgagggttcaggcttattggcagatggtgctggacaattaacgactggcttaggccaagcgggtgctgggattagcttattaaacgtcaagttaatcgatggtagcaagcaagttgccaatctttcaacaggttccgcaaatgtagaacatttcgtgcaaccagtcaaagatcaattactatcagatacaaatcatggcgcattaattaataccttctcgccattagtcttaacacttgtcttctttgttggggcaatgttgacgcaattaacactttatcgctatggtgaaacattggcacatagcggtcttaagcaacggatgttggttgtagctggcgtagttgtcgcacaagccttattaattgatatctttgcaaacctttttggattgacgattgcacaaccgttcgcattcttcgtcttaagtatgatgacgagtgcggtctttacccttgcatgtttagcattggataaactttttggaacgatgggaattttaatggccttcgggttattgttcttacaactcatcattacagggggactcttcccgaatgacatgctttcaggcttctatcgtggtgtggcaatcttcttgccagggacttacacgattagtgggttcgaacaagttgtcaacggcaatggttcacaactttggttagtcttaatcgtcttggtgatcttttgtgcagtgttcttcgccggtttgttcggcggagagttaaaacaaaagttaacgcaaacaccaaatagtcaagcttaaagatttgtggtacagttaagaaaataaataaaaaggtgggaaatattgtgaaagatagtcaattgttggatgaatacgttgaactttacatgtcggcgattaaatatgtcgaagacttggtttctgaaccaacgcaagcttaccaattgtcttttgaacaatatctgattatgaaagagattgctgatgataattcagtgagtctaattgatattgctaaaaaacgaggcgtaacacgcggtgcaatttctcgacagattcgtgttttacttaaattagactatattacacaagaaattgatcccgatgatcggcgccggttgattttaaatttaacgccgtctggtcaaaaaacagttgaagaattaaatccgaagatccataatcggtttgcctcgtggatggagacgtttggtaaggaaaatgccaagcagatgcttgatttaatgaatgaatttagacataagattatggtaaaagataatcaataatatcgactgaagagcactgacagatgattgtcagtgcttttttagatgcattgttaaaaggttggtttttacaagcagatatgagtataatgaaacaattaaatgctaggtaaaaggtgaatgtgatgcaacgaattgaaaaagcacctgctaaaatcaatctcagtttagatgcactctttctacatgacgatggggaacccgagtggcagatggtgatgacgtcgattgatttggcagactatgttcagataacattacgcgatgatcccgcaattgaggtccgcacatcaagtggctttttgccagaagaccagcgtaacctggcctacaaagcagctcaattattacaacacacctatcagattccaaccggtgctttaattgaaattgataagcatattccagttgcggctggcttaggcggcggaagttctgatgcagccgctgttttacgggggttaaacgaactatggcaacttggtttaacgcgcgaacaattggcgcgattagggctacaaattgattcggatgtgccatattgcgtatatggagaaaccgcccttgtcactggcaaaggcgatcagatcaaaccactcggatcattaccgaatttttgggtcgttgtcgtgaaaccggaagtcagtgtttcgacgccgcggattattcgtgcattggattgcgaccagattcaacagcatccacaaactgaggcgctggttgcagccgtcgaagctggagatttaaatgcaatgactcgcaatatggggaatgttttagcaccgattacgactgaacgttatccagttatcaagcaattaagtgagcggttattgcagtttggtgcggatgttgctcagatgagtggtagtggtccaacggtatttggtatctgtagtcagtattcacgggctcaacggatttataatagtatgtccggattttgcgctgaggtatatctggttaaaccattgaaaccataataaaacgccgacaatcaaatggttgaggcgtttttaattggcgtaggaatcgctttaatgggataaaagcgaacaattaagctctttttttaaaaaagactaggatttaaccgaagatttctatataattgattggtagacagtttttttcggaaataacagtaaagtaatatatagaggggtattcaacatgaaagttagaagaagcgatcgattaatcgatatgacacgctatttattagaaagaccacatacgttgattccattgacattcttttcaaaccgttacgaatcagctaagtcatcaatcagtgaagatttatcaattgtgaagcggaccttttttaatcgtggcacagggatcttagaaacggttccgggcgctgctggtggtgtgcgctacatgccaatgattaaacaagatgaagcagaagcttttatcgctgagatggcacaacggctttcagaaaatgatcgcttattacctggtggttacgtctatttatcagacttacttggacgtccagaagtattacggcaagttgggcgtttaatcgccaaccaatatgtgggtaaagaagtgacggctgttatgaccgttgcaacaaagggaattccaatcgcacagagcgttgcgatgtacttaaatgtgccatttgtaattgtgcgccgtgattcaaaaattactgaaggttcaacggtcagtgtgaactatgtttctggttcatcagctcgcatcgaaaagatggaactttcaaagcgcagcttacctgaaaattccaaagtcttaattgtcgatgatttcatgaaaggcggcggcaccgtcaatgggatgaagagcttgattgaagagtttgattctgaaatggttggcatttctgtctttgctgaatcagatttcgaaggcaatcggatggttgatgattacacatcaatcttgaaggttgataaagttgatattgaaaataaaacgttaagtgtcagttatggtaattacttaacaaagaatgcagatcgcttagcttaaacgatttgatagcacccggacaggttaattgtgcgggtgctttttttatttgaagtgctttcggacagtttccaagctttgtccgttgcataaatgacagcggtaacatagactgaagttatatttaagaggaggttactatgaaaaaaataatgaatgatccaagccaaattgtaacggagatggtccaaggtttagtgcggagttatccagaccaactcaaacaaattccaggaacagaagcagtgatgaaaatcgccgatttaaaacatcggccacaagtcgggattgtcagtgggggcggtagtggtcatgaaccaacgcacgctggttttgtcggcgatggcatgttgacggccgctgtgtgcggacaagtctttacatcaccaacacctgatcaaatttatgaagcaattaaagcagctgacgcgggccgtggtgtgttcttagtcattaagaattattcaggcgatgtgatgaattttgaaatggcgaaggatatggcggctatggatgatattgacgttcgctcaatcgttgttgatgacgacattgctgttgaaaatagtacgtatacgcaaggacgccgtggtgttgcggggacaatcttcgtccacaagattctgggtgcttatgcccgtcaaggtgctggtatcgaagcaattgaagaattagcgcaccaaattacaccgaatattaagacaatcggggtcgccttatctggcgcaaccgttcctgaggtcggaaaaccggggtttgaattagcgcctgatgagattgaatatggtgtagggattcacggtgaaccaggttatcgccgtgaaaaattacaagattcgaaacacctagcaactgaattagtcggcaagttaaaagaagcccaccacatgacggccggcgaacattttgcggtaatggtaaatggcttaggtgcaacaccactgatggaacaatacgtctttatgaatgatgtcttggacctcttggccgctgaaaatgttgaagtcgacttcacaaaagtcggcaattatatgacctctttagatatggccggtgtgtcattaacaattatgaaattaattgaacctggttgggttgctaaattagatgaaccagtcacaacgattggttggtaaaggagagataccatgttaacagttgaaaatacattgaaatggcttgaattgtttgatgcaaaaatccaagctgaaaaagattatctaagtgaacttgatacaccgattggtgatggtgatcacggtaataacatgtcgcggggcttgttagctgtgcatgacgcattgaccaagcaacagccaaccgatgtacaaggtattttgaaaacgactgcgatgatgctcatcagcaaagttggtggggcttctggtccactctatgggacagcctttttagaaatggcaaaactaagcagtacgacacttgaagtcggcccattgttggcagccggtttagaaggaattcaaaaacgcggacatgcacaagttggtgaaaagacgttgattgacgtttgggctcccgttgtcaaagcggttgaagatggtactttagatgtggctgcaattgaagctgccgtcgaatcgaccaaagatatgcaagcaaccaaaggtcgggcatcttatgtcggtgaacgctcaatcggacatgttgatccaggggcggcttctagtgggtatttatttactacaatgttaatggcgggggtattatcatgagtgaatatggtgttgtgattgtttctcacgtaccagaaattgcggccggtgtagcgcgtttaattaaagaagttgccgctgatgtttcagtaacgactgctggtggcacggacgaaggtggtattgggactagcgcaatgaagattcaaagtgcttttgaagccaatgccgggcaagaattgttagccttctacgacttagggagcgctaagatgaacctcgaattggcccaagaactaacggataaaacggtgcatctatacgatgttgctttaatcgaaggttgctatacggcagcggcattgttgcaagcagggacggatttagctgcaattgaagcccaattagcaccgttgaagattaaataagaagtaaaaactgcttaaaatgatgtctgttttggagactgagtttaagcagttttttatatagaataatattcaaaagaaaagatgatttttaataatgtaactagtaataactttaaaatattgttgaggacggtaatgtgattttaaaatacggtaagctatgtattaaatagatattgctgttatatttaaataaattaagaatgaatactatgattaacatattattaggaggattcaggttgaaaaatattattgttactggtggggccggctttatcggttctaacttcgtgcactatgtggtcaataaccacccagaagttcacgtgacggttttagataaattaacttacgctgggaatcgcgctaacttagccggtttacccgcagaccgtgtggaattagttgttggtgatatctgtgacgctgaattagtcgataagttagttcaaaagacagacgcagtggtacactatgctgccgaaagtcacaatgataactctttgaaagatccttcaccttttattcaaacgaacatcatcggttcatatacgttgatcgaagcttgtcggaagtataatgtgcgttatcatcacgtttcaaccgatgaagtatacggtgatttaccattgcgtgaagacttaccaggacacggcgaaggcgttggtgaaaaattcacgcctgaaacgcgctataacccaagcagtccttactcatcatcaaaggcgagctcagacttgttagtgcgtgcttgggtccgttcattcggcttacaagctacaatctcaaactgctcaaacaactacggaccttaccaacacattgaaaaatttattcctcgtcaaattactaatattttaagtggtattcgaccaaaactctacggttcaggtcaaaatgtgcgtgactggattcatacgaatgatcattcaagtgccgtttgggcaattttaaccaaaggcaaaatcggtgaaacttatttaatcggtgccgacggcgaacaaaacaacaaagatgttttggaattaatcttagaattaatggggcaacccaaagatgcttacgatcaggtgaaagaccgtcctggtcatgacttgcgttacgcgattgattcaacaaaattacgtgaagaattaggttggcaaccagaattcactgacttcaagtcaggcttacaacataccatcgactggtatcgtgacaatgaagactggtggcaagcagaaaaagcagctgtggaagccaactacgctaagaatggtcaataaatatgaaattaaattttgatgggattatcttataattaccgttgttcatataagtgtcctgtccgtaataataaaccgttaattgtatcagttaatgtcatttttagggcagtgattacttttgaaactgattggggatgacgactgcggagccattcagcggtgtaagcaactaatgcgttggaaagaaaactaagtaaaaaggcttggtagtcggtggataacgtaatgtgatgggcgctagcaagatcttgaataatccgattaatcagttgatggacgtgatgaataaaatggcgttcgaaggcgttttgcccttcaatcgacaaagcattttgatagaaggcgcggttagcatcgaagtagttaaatagttgcgccaacacctgtgtccaatgaatatagctgagatgctcgtcgatgtagacaccgatttcttgatcgtaaatccaatctaataacgcatatttatcagggaaataatcataaaaggtttggcgtcgaatgccagttttattcatgatggtggtgacgctaattttattaaaaggttgttcaaccattaattgtttaaaagccgtggcaatcgtttgttgggttgtctgagtcatcagggcatctccttttgaacgttattaagtaaaaagtcgtcattcaagctagtgaatgacgacttttgtattatatggaattgcggtatagaaccattgggcatcagctactgataaacggatacagccgtgtgaattagcttttttgcctaattgctctgcttcttctggaatgaaattgccagcttcatctgtgggcacactgtgaaaaagataaataccatgatctaggaaagagcgccaatatttggcaccttccccggaatttgcattgaaaaatgagtcgccgtgttcagcttcgatatagaaggtaccagttggtgtgggtgactcaggggaaccggtcgaagcatgcattgtgtacaaaagatcattgccatttttaaggtagacacgttgctgtgcaattgaaacgtcgacccataaatcgggttgttcgtctaaattaggatatggtttgttttcggaaggcgcacgccagtcaattggtgtcgggtgagccgctttttttgattttatcgattgttgcctcgcatgcgattgtgatttggtagaggacgtgactgcggcttggtgtgtttgatgccgagctgaggtagaccaatacccaccaactagtaaggcaatggcaacaatgatgctgccgagcattaatcgaatgttgtttgtcagttttggcatggccgacttccttccgcaataaagtacctccagtatacgggataaagcgctaaacttcaatacggattagcttgctctagcctagtatttaagctaaaatagaccagtaatcacgaatgacgaggagcttatgatggttaataaaaatgcaattattttagcagcgggtaaaggtactcgcatgaagtcaaaattatataaagtattacatgaggtttgtggtcgaccaatggtagatcatgttttaacccaagttgaaagaacgcacccaaccaatgtggtcacaattgttgggcacggcgctgaaaaggtgaaagattatctcggcgaccggtcacaatatgcattacaagctgaacaattagggactggccatgcggttttacaagctgaagctttactgaaagatgaagatggcattacgattgtggtcagtggcgatacgccacttttaaccgctgaaacctttgaaaaattatttgcataccaccatgataaaggcgcaaaggcaacgattttaacagcaacggccccagacccaacaggttacggccggattatccggaatgatatcgggattgtcgaaaaaatcgttgaacaaaaagatactaatgataaagaagcggctgttaatgaaattaatacgggcgtttattgctttgacaacaagaccttattccaagctttgcacgaagtgacgaatgagaacgcacaaggtgaatactacttaacggatgtggttgaaatcttgaagaaaaaaggcgaaattgtcgctgcttacagaatgccaaactttgaagaatcaatgggtgttaatgatcgagttgctcttgctgcagcaacaaaagtgatgcgtaaacgcatcaatacagaacacatgcgtaatggtgtgacattaattgatccagaaaatacttatatcgaagtgggcgttcagattggtaatgatacaattgttgaacctaacgtcgtcttaaaagggaacacaacaattggttcagattgtttcgttggtgctggctcaactattattgattcaacaattgaagacaacattcaaatcacaagttcaacgattgaatcagctatcatgcacacggggtcaaacattgggcctaacagtcatttacgcccaaacgctgaaattggcgaagacgtccatgttgggaacttctgtgaagtgaagaatgctaaaattggcgatcgcacgaagattggccatttaagttatgttggcgatgccacattaggcactgatattaatgttggctgtggcgtagtctttgttaactatgatggcgtggctaaacaccacgcaaatgttggcagccatgtcttcatcggtagcaactcaaacattgtcgcaccggttgaaattgcagatcacaccttcattgcagctggctcaaccatcacggatgatgtcccagaaaaggcaatggccatcgcccgtgcccgtcaaacaaacaaagaaaactactgggcaaaactaccagtagcaaatgacgaagaatggcaatagagtgctggctgtggcagttagtaattgagcattaatacgatgttagattaagcggaaattacggtgacaagaagcacgttttggattaaagtgtgtttgtgacgattagcttagtgttgtaaagcacatcttaaaataaaaatcgtccgtaatcttatttttgagattacggacgatttttttgatacttgtagttattttaaagttgagaaataatcgcgtattaagaaggcgattagaaaagcgggccaaatccaaattgaaccacttgaaaataagattagaagaagtatgataagactcccaacagcggtggttgcccagcccatttttgtaatgcgataatttttaggattatagttcgggtgactggggtagaaaaaatgatactgataaatcaaaacggcaacgaatagaataagaccaagaataaaatagggcatgctgaggtgaaataagcgatcggaagtaataataattaccagaattaaaagatagagattattaaaaatagtgtatttaaggcgggtcatagtaacctcctttttcaattagtgtaccttgtcttgcgctaaatgacaatttaatccataatccaaaataaacaagcatttttggggatataatgggatactaaacgggaggttcgatggtaatcgctattaactttttctttttctctcacgtttctaatgaacagcgcttactttacaacatttgtgaactttttaagttttaatcttgatttccggggtgaaaatgcctaaactttaaataggtactaacataaatttttggaggctgacatgtctgaacaatatttcgaccctaagttgaaaatctttgctttgaactctaataagcccttagctgagaaaatcgcggctgaagttggggttcctttaggaaaatcttctgttaaacgttttagtgatggtgaaatccagattaatattgaagaaagtattcgtggcgacgaaattttcattattcaatcaacatctgcaccagttaatgataacttgatggaaatcatgattatgattgatgcattgcgtcgtgcatctgctaaaacaatcaatgttgtgttaccttattatggttacgcacgtcaagatcgtaaggctcgctcacgtgaaccgattaccgctaaattagtggctaatatgttaacgatggcaggggctaaccgaattttagcattagacttacatgccgtacaaatccaagggttcttcgatattccagtggatcacttgatgggtgctcctttattggctgattatttcttgagcaatgacttggctgaaaatgctgttgttgtttcacccgatcacggtggggttacacgtgctcgtaaattagctgatttcttaaagacaccaatcgcaattatcgacaaacgtcgcccaagaccgaatgtttctgaagtgatgaatattatcgggaatgttaacggtaaacgcgcaatcatcattgatgatatgattgatactgccggcacaattacgttagctgcgcaagcattgaaagatgctggtgcaacagaagtattcgcatgttgtacacatccagtattgtctggcccagctattcaacgaatcgaagattcagtgattaagcaaatgattgttacagattcaattaaccttccaaaagaaaaattaatcgataaaatggtacaagtttctgtcgggccacttattggggacgccatcaaacgaatccatgaaaacaaaccagtcagtccattatttgaaaacagatttaaaagataagcgtgctaactcgaatgggttagctttgagaaagcacatttcaataagctaacaattaaaaacgcctgaacaatttgttcaggcgttttttgtgactttatttttctttgttagctaataaatcgcgaatttcttttaagtaaacttcttctttcgtttcgactacttgtgcttcttcttcttcggtcttcttgcccatgtcacgaagcttgttgaatcctttgacgattaagaagacaacaaatgcgatgattaagaagttaatcacatcgtttaggaagttcccgattttgaaaacagccttggtgcctggaatggtaagcgcaataccggatagatcaacttgtccaacgaataatgaaatgattggattgattaagttctttgttaatgagtccacgatgctttttaaagcagcccccaaaataaccccgacagccatatctagcacattaccacgcataataaattctttaaattctttaatcatgaaaacgacctccattaatattattaattattgctacaaaaagtataccgtatttccagagcctataaaataaaaatgctgtactagttacataattaaccaataaatttgttattttcatgaaaaatcgttaagatagtcacaggaattaaataacagaaattagagatagaggaaccttagatgaattggattgtacaattgtatcaaccattctttgaactgagtaattggcaaactgtcattacgtcgtccgaagattggcttttaattttaacgttagtgattatggaatgcttactctcagtagacaatgctgttgtattagcggcacagacacaaacattacctacaaaaattgagcaagaaaagtcattggtgtatggcttatggggcgcttatgttttccgcttcattattattggtgtcggcacctatttaattcatttgtgggaaattaaagttgccggttcattgtatttaatttacttagtcattgcttatttcagaaagagtgggcatccgaagcaggctaaaacaccggaggcgggttctaaaatcagtagtccgcatcggttctggcgcacagttgcttcgattgaattgatggacattgttttttcaattgattccgtattagcgtctttagcgatttctagtaatccggtgattgttttaattgggggaatgattgggattatctgcatgcgggggattgcccaactcatcgcccaattgatgaagaaaattccggaattaaatccgatggcttacatcttaattctcttcatcgcgattaaattattcttgtcgattccagccattgactatgaaattcctaacctagtgtttgctggaattgtgtttggcgttattctactgacgctcattattcattatgtccgtgcagcacgggctaaataggcatcataaaaaagccgttgtggacaaattgtccactgcgataatccctttatggttgtcagatgaaatacaataattcatctgacgactatggagggatttttgtatgcccagatctaaacatacggtactcgagaaattaacaatcttagatgaactgacccaatcaaaaattggactgggtccggtggccaatcgccatggcattaatcataagacgctagagcgttggcgagatcgatactcccgtgatggaattaatggtctaaaggaggctaagaaaaacaaacactattcgaagaaactcaagctcaaagtagtccacgcatatcttataggcgaaggcacctttgatgaacttgcaaataagtttggacttcgtggatcgcagcaagtcgtagactgggtaaacaagtataatgggaataaacctttgacggcgtcgccgtccagaaagcaggttcccactatgagccgtaaaacaaccttggaagaacgcattgaaattgtcgagtatgtcaccaagctgaatcattcatacacagaggccgctgaacgcttccaagtctcttatcaacaagcacgttcatgggtaatcaaggccaatcacggcggctatgaggcgctcgtggacaaccgtggccatcacaaagaacaagctgagctgactgaactcgataaagccaatcttgaaatcaggcagctcaaagcacagctcgcagacaaagagcttgtggaggcattcgcaaaaaaattgctggaaatccagcgcagggggtgagtaaacaacatcgactgtcttacttcgcaattaatgaggtcagtcaaggcaagcgtggtgcaatatctacgctgttggccgttgtcggtgtaagccggcaggcttactacaaagggttaaatcgagaagaaacagcttgggaagcccgtaatcgtcagctcaaggaacggacacaatactggtttgattttcatcatcaaggtatcggtgctgggaaccttttattgaatcttcaacatgatgacctaattgacttccccgttactttcaggatggtacgtcgtgtgatgcgggagctcagcttgacatgtcaaattcgggtcaagaagcacagtcgacataaggagaacgaacagcacattcaagacaatgtgctcaatcagaacttcgacgtcgacagtcctaatcaggtctggttgtccgattcaacggaactgacttacggcgtaaataataagtataaggtgcgcttgagtggcgtccttgatctctacggccgacgtttattgtcctacaatttgagcactactgaaacgtcagcagcagaaatcgaggttttccaacgagcctttgaggcttctggcgacgtccacccattggttcacactgatcgaggatcagcctacacctctggtgccttcaacaactttcttggtcgttacaacgtcacacgtagtatgtctcgaccaggaacaccatacgacaacgcaccgatggagcgctggtggaacgaattcaagttacggtggatggctcgccatccactagcaaagacttgcgaagagcttgtaagactggttgaggaaggaatcgaatatttcaatcaccacaaccgctcagcacaaagaaacggcctcaccccagatgaatactggagtgaagccgcatagagacagattcaactttatattatttcatttgtcaacttgacagggcctagtgcacacaacggctttttacgttacatatgattgagtaaaacagttaaggctgcaaatgcgacacttgcaattgcgactaaaatgaattgatgctgtttcattttgagaattgcaatgaattcacggatgattgcatttggtaagaagtaacgcgatgttttagcgccaatgccatctgctttcaaacgggcttgctttgcaaaaagcccagcgcggaatgtgtggtaattattggttgcaaaaataattttaggattcgttttagtggtatcagccatgataatgtcttttgaaaattgcatgttttgtaaagtgttgactgatttttcctcggtgagggtgtctttaatcggaatcccttgctcaatggcgtaacgttgcatggcaactgattcaggcagcttctcatccggaccttggccgccagaaaagaccagttttggtgcagggcggccttttttgacttgtttatcataaaatcgaatggcgcgattaatccgactggccagtaacggtgggacgaattgaccatcgattaaaccgctacccaagacgatgatgtaatcttgttgataacgggggcggttgaattgatagataatcagtgaggttagatataaatagaagaacaatggaatatacaaaagaaaaaccgatacaatcgtgctgacaaataatttaacatcggcgggaatgtgtaacaagcgcgtgatgattgggatgaaaaatgagccaatgatggctaacgcaatgaggagggtcagcatgttggataacgtgtgactttcttttttccagacaatatacgcgttccacagcaacaagacaataccgaataagtagaagaacatgacgattagaacgacaacaattgcagcagcaattgcaatgttattcagcgtttcgttattgaggcgaatcacaatgagcgcagcatccattaatgcgctgaagaggaaaaagttaaatacaatgccgttgattaattggcgtttttcaaatcgctgtaaaccaatgaataaaatcaaaaagaaaaggggtgacgcgtaaacgagatcaattaacgtagtcataataactccccttatgattaggcttggctttcaaaggcgtatgtttcaatggcgtatgccacgccatcttggccttcatggttactcttagtaacaaccttagcaatttttttcaattcaggaatggcattatccatggcaactgggaagccggcgtattctagcattgatagatcgttaccttgatcaccaatggccattacttcagattgatcaatatttaaggcatttgctaaatcacgcaaaccatttcctttaccggcgttcttgttgagtacttcgaggaagtaggcttcactttgaacaaattgataacgatcgaaaaaatcagcaggaatcttggttttggcttcagctaagacggcgggttcgtcgattaacatcacttttgaaaaggccttgttaggtgcgatttcatcgacatggcggaaacgaacaggcatgttgacgagggcactttcaccgactgtataaggactgatatcgcgattggcggtgtagatgaattgatcgtcttcagcgtgtaaatgagaaccaatttggcgggagagggtttcaagctcaagatattggtcacgcgcaagagtgtgacgcactagaatttcaccagttgctgtattttgaaccaaagcaccgttgaacgtaatcacatagtcagtggcttcagttaaacccagttcttttagaaaaggcgtgaccccggtgagtggtcgcccagtacatagcacaactttaacgctatgttttttagcagctttgacaactttgattgttttagggctaaggatgttattttcatttaatagggtgccgtccatatcgacagcgacaagtttgattgacattataaaaactcctttttagtggttaggattgattgcaccgttacgcaagtatgctttgaactggcggtatattggtgcgaagacttcgatatcattttcgttgagcatttctttagggaaatagaagcgttcatcgccgctaaaacggcctgagatggcggccaccaagtcacttaatgatgataactcttcaagttgaccatcagattgtataatttcaatctgagttttgggtgatttagcggagggatcataggcgtcatacggcaaatcgaaactgttattaacagcagtgtaatactcactgttataaccagcttgctcggttagcgcccgtaattctggtaaaacacgttgggtctgttggctaaaggcaaccgatttgagtgggcggcggcttaaaaagcggtcggccaaatcattgagcactgaatccggatagtctaaccagtatagaaaataggtattcaaaacgccatcatctaattttaaatagtcttgtaaggtgaagttctgttcgaaaaatggaatcaataattgcggtgcgagactctgatgatggtcaggctgttgataaagaaatttcgcacgttgcaagagcttttgcaagataacttccatgccgcgtgaaacaggatgaaaataaacttgttgatacatctggaaccgactgacgatgtaatcttcaacggcgtgcatcccgtttgctaaaaaggcaatgcccttatcgtaaggccgcatgactcgtaaaacacgcgtcaaatcgaattctccgtatttagtcccagtattgtaagcatcccgtaataagtaatccatgcgatcagcatcaatctggctggaaatcatctggacaacttgtggatttggataagaatgatcgattacactagcgactttcgcagggaaatcatccgcgacttgggttaagacgcgattaatggctgtctccgggttggtgataatttggcgcgtaatcaattcatgatcagtatcgaagatgtgttcgaaggtatgtgaataagcgccatggccgatgtcgtgcaataaagctgcacataaggcgactaaccgttcatcatcgttccaaagtccatcaccggcaacttgactagggtagttaagttgaaattgatcacagatttggcgtgtgatttcataaacacctaatgagtgggtgaagcgggaatgttcagcgccttggaaaacagaggaagtcgtgccaagctgtttaatccgccgaagacgttgaaattcgggggtgtcaattaaatcgagaatcacttgatactcgacgcgaatgtagttatgcacaggatcacggaatactttttcacgcgatagtttaatagcggtgttagtcacaatataatctcctttttgaggcccgttaaacttgataacggtggagtgctgtttgttttttaagtagtagttgttgataagctttcgtttgtaattgtggtgtgaggtcaactagttgtggttgttgaaccaaccggctaaaagcggtctgtaggtgcgtaatggctgttgcaacagtcattggttcgtttaacagatcagataggttggccatggtgtccgggatgaccgctgggaaagtccaccgcgtttggctttgtgcttggccagcagtgtaaaaactgtgcatgagtttgccacgcgcctgttgattgcctgtaatgctggcatataagagtacggcaattccgtttttggcacggcgttgggcaataccggcaaatttttgaccattgatgctgagatcgtattcgccagggcaataggagtgagtgacttcgaaatggtcaatcgtgacgggatagtctgcaaaggcagttgtgaacaattggtgcatgagcgcgtaagcagcattaatgcttaggtgatccgccatatcaggaagatagaagctgacgttcaaaacgccggcatccgtcacaatccccaagccaccagcgttacgcacgaaatgggcatagtgtgcagcctctaatgtggcaaccgcttgtggataagcaggtaactttgtatccatcatgcccaaaataacattgtcagcaagcgtccaaaaatgaataataggttgttgtaattcgcggctcaaagctaagaggctattagcatgagcaaaagcgagtggtccagccgctttttcaaaatgttgggttaaaatagcccattcttgattggcagataaagtcgctaaatcatccatggtaatcacctccgaaaattaaaaactcttcttaattatagcgtaaattctaggcgctgtctgcaatcggtacgctggtcaaagagaattggcggattattctggcgctcaaattttgaatggcttataatagaactacttaattaaaattaaaggaagttatttatggcaagtcaaagcggaattccggtcaaggtacaccttgaaacgcaaattcaacaagatgggcaacttgaaaaacacgttttcgatgaggatggtcaagttgtcaaaatgggagagtcactttacttacgttatctggaacacggtggtgaacaagccaccgcggtacggtttaaattggctgctgacggtcaaattcaattaacgcggggcacagaagaagacgagacgcaattgcggttgtactttaagcaaggtgaagacctcggatcaatttaccaaacaaaatatggcaacatgccagtgctcacaacgacaacccatttattatcgatggtgaaggaacaaccgttatcaggtgaaattacggttcattaccaacttgccatcaataatcaagccgtgggggattacaaattacgattgatttttacagcttaagctagtatgattaaggatagactgttgaaaggacgtgtactggttgaaattagacgtttttaaaggccaaaataaagaagaactatcaatgattgaagtcgcacatgcaattttagaagaaaaaggcgacacgattgcattcgctgacttaacgaatgaaattcaaaactatttaggcaaaagtgatgaagaagtgcgtgcacgcttatcacaattttatacggatttaaatgaagatggtagtttcatttctttaggcgaaaacgtttggggcctccgttcttggtacccatatgaatctgtcgatgaagaagttaaccatccagaagatgaagaagaccaaccaactaagaagaaacgtcgtaagaaggttaatgcattcttagcagatgttaccgacgatgacgatgtgattgattacagtgacgatgatccagaagacgaagacttagatgctgatgatgatgttgatttagcagctacagatgacgttgctggtgatgacttaactgaatacaaagctgacttacaaaacatcggtgacgatgacgatgatgaagacgacgatgccttagaagacggtatcgaaggtcaattatctgaatttagcgatgatgatgaagacgaagaagacgaagatgacgagctttaattagacgtttccgattcgttgccataaaaaaagacgccaaagttaactttggcgtcttttttttgcgtttaatatttttaagctaatcctcgtcggatacccgacttacgacacactctcgttcaagaaaatggtaaaccgcgccgattaagttggcgtcttggttgaagtgacaaatttcgatgtgtggcacaggaataggggtggttgcccctgcacggcgttgccagtaacgattaatactactattgtcatcggctaaaagtgcgtcaatcgcagcgtttaattttggtagtaggtcagttcgctgactaatgccaccaccgacaccaataatctcgggcgtgtaagcaacgtttaaaaagagcatgatttccgcaagggcagcatacatctgtgtgacttcttgggtggcaatcggatccccttgatcggcaagttcgaagacggttttgccatcgattgtattggggagtttaaaattacggagggagacagtcttgccaatttggacgggtgagacttttgaattgttgagtgttttaatggcatctgcgatgaatttttcgaagttatcgattttatcagcagtggttttgagaatggtcccattttcgataatggataagccaatcccagaaccaattattgtgaataaggcgctcagatgaccttgaccaatcccagctgtcatctcggcgagtgctgcactgtcggcatcattttggagagagacgggcagaccaaggcgcgttgcaaattcagtttgaaattcaccgaggtgcaaaaatggcacataactcatgccatggatgatgccagtctgttcatctggatcaccaggacaactcaccgcaattccagttaaatgaaagtcggtcgcaaattgatcacgtaattgttcaacttcggaatagaagcgattgcgtgttagcggtgtagggaattgcgcttggttaattagttggtgtttcgtccaaatcccatatttgacggcagaaccgccgatatctagagctagtaacgcgtcttgtagcatggtgggccatcctttcaaagtaggtcatgcaaatagtgtagcataggcgatttaaaatcggcgcagaaatgactaatttttttgcttgacgctaattgccatttcttgtattatattctttgggcgctttgcagttactttaattgcgaagccagaatcggttaacaggctccctgttcattttgaatagggagcttgtttttgtttttggttgtttcccaaaagcatgaatgtttagcgtaatgctaagaagaaaaggagaatatttatatgaccaaatatgtttttgtaacaggtggcgttgtttcttcacttggtaaaggaattgttgcggcttcacttggtcgtttgttaaagaatcgtggattaaaggtaacgattcaaaaatttgatccatacatcaacgtggatcccggtacaatgagtccttaccaacatggtgaagttttcgtaacagatgatggtactgaaactgatttagatcttggccattacgaacgttttatcgataataatttaaataaatattctaacgtgacgacaggtaaaatttattcagaagttttacgtaaagaacgtaaaggtgaataccttggcgcaactgttcaagtcattccacacatcacaaacatgattaaagaaaaaatcatgcgggctgctacaacgactgattcagatatcgtgattactgaaatcggtgggaccgttggtgatatcgaatccttaccattcttagaagcacttcgtcaaatgaaggcggatgttggcgcagaaaactgcatctacattcatacgacattggtcccttacttgaaggctgccggtgaaatgaagaccaaaccaacacaacacagtgttaaagaattacggagcatcgggattcaaccaaacgtcttggtttgtcggactgaaaaaccaattcctgatgacatgcggaacaagattgcccaattctgtgacgttgaaccagaagccgttgttgaatcacgcgatgctgaatcaatctacgatattccattgttattgaagaaccaaggcttagatgattttgtcttgaaccacttcaagatgacagcaccagaagctgacatgacagaatggattgatatgttacacacaatcaagaacctcgaaggcacgaagaagattgccttggttggtaaatatatcgaattgcaagatgcttacatttcagtgaacgaagcattacgtcatgccggttatgcttataacaccgatgttaaagtgacaccaatccaatcagaagatattacgaaagaaaatgttgctgaaacattagctggctttgatgggattatcgtccctggtggtttcggtgatcgtggtttagaagggatgatcctttcaattcaatatgcgcgtgaaaatgatgtaccatatcttggtatttgtttagggatgcaaatggcaagtattgaatttgcccgcaacgttgctgggattacagatgccacaactggtgaagtgcacccagaagcaaaacataaattaatcgacatcatgtcagatcaaaaagatcttgaaaacatgggtgggacacaacgtcttggcttgtatccatgtaaattaaaaccaggtacaaagactgctgctgcttatgataaccaaagtgttatccaacaacgtcaccgtcaccgttatgaattcaataacgaataccgtgaattgttgacagacaaagggctagtctttgccgggacttcacctgacaaccgcttagtcgaagtcattgaaattccagaaaacaaattcttcgtggcagctcaatatcacccagaattcctatcacgcccaaacaaaccagaaggcttgttcaaggcatttattggcgcaacaatgtagagtgctgactcgaacgggttggctttgaggattaacaagaaaataaggattatggcgttctttagccataatccttatttttaggttaaccggaaaaggcagttcgaggaagcacgtttcataaaagacgctactagtcagcacgacaaagtagcgtctttttgtataccgaaaaatagttgtgaaaatggagatgagccgttttgaaaagccttacatttttagacttcgatagcccaattgaatgcgatgattagcttttactaagtatgaaaattaaaaagtaaatgttatccctaaatgccttgtaatttatgtgctgattaattattattatacatgtatgactaattatcaacggcattgagtagattgaagccgttttccaattttaaaaaataaaactaaaaacttaaaaatatcaaaagcgccttctggtttaaaccacaggaaaagtgggaaactgaaggcggttcttttgttgcagagcgaacggggaaatctaaaaatgaaaaaaatgttaattcaaggtggcaatctcttatctggagaggtcacaattggcggtgcaaagaatagcacggttgcgattattcccgctgctattttggcggagtcgaaagtcgttttagactgtgtgccgcacattaaagacgtcaacagcctactatccattctagaagatatgtctgtctcatctacttttgttgatgacacggttgaaattgatccaacccacattatttcgacaccacttccaagcgggaagattcaaagtttacgcgcctcatattatttcatgggggctttattaggtcgttttggggaagcaatcgttgggttgccaggtggcgacgatattggtccacgaccaattgatcaacatattaaagggtttgaagcacttggtgcgacagtgactaataaccacggtgctatccaaattaaggcaccaaacggcttacacggtgctaaaatttatcttgatatggcatcagttggcgcaacgattaatttattattagccgctgtccgtgctgaaggacaaactgtcattgaaaatgcagcacgcgaacccgaaattgtggatatcgcgacattcttgaacaacatgggtgctaagatccgcggtgctgggactgacattatccgcattgatggggttgaacatctgtatgggcgcaatacacacaccattattcccgatcggattgaagcgggaacttatttaagtatggctgcagccatcggggatggcgtgaacgtcaagaacatcatcagtgaacacatggacgcttacctcgctaagttagaggaaatgggcgttaagatggatgttaaggaagatagtatcttcgtttatccatcacctaatttaaaaatggttcaaattaaaactatgccatatcctggatttgcaacggatttgcaacaaccactaacgccgctcttattaaaagcgcaaggtgaaggcattgtggttgataccctttatcctaaacgaacacgccacgtcccagaattaattcggatgggtgcagatatctcaatcgaaaatgatgtgattattttacatcatgccgacaagttacaaggtgccgaagtatccgccgatgaaattcggggcggtgcttgtttaatgatcgctggcttaatggccaatggtgtgacaacgattgataacgcaagtaatattttgcggggctatgaccgcgttgttgataaactaacgggtctgggcgcaatcgtcaaaatggttgaagaataagttaaccatctattgttttttgttagcattcatgctaatatttaatggttatgtaaacaaatatctctgacatagcaaatatctcagggcaagacttaagttgtgcatctgaattgatgcagataactttagcaaaaaggagcggaaaagacatgaaacaaggtattcatccagattatcacaaggtagtatttatggattcatcaactggcttcaagttcatctcaggttcaactgctaactcagctgaaactgttgaatgggaagacggtaacacatatccattaatccgtgttgaaatttcatcagattcacatccattctacacaggtaaacaaaagtttactcaagcagatggtcgtgtcgatcgtttcaacaaaaaatatggttttgcagacaagaacgctgccaaataattattttgaaaccggggaatttttccctggtttttttttgcctttttttccataaaaatagccaattgcaaacggcaatcagctatttaatcaacattttttgaattcgatgactagcgagacacgctagcaaaatgactgggaaaaattgaatcgggaaaagaaagagtaacaaagtagcagtgacgtacggttgcgccacgatcaccgtacaactgacagcgacaaccgtggcaaccaggaggccgggagtgtatggcaatacaacggcgagacttaaaccgattgccgcacttgcaaagatggctgggaaaattttaccgccccgccaaccaaaggcaaatagcagattagttagaacggtttttccaagtccgattaagagtaaataaatgaatgattgatctaaaccggatttggtaaaggtgaacaagtagtgttctccagaaaagagtaaataaggcgacaatagaccacaagcacccaagaacacaccagcagctatcattgcaagtaagaccggccgctgaatcgtatcaaagagccactggcaccattgttctatttttaagaatagattgccaaaaactcaaccgacaattaatgctaaaataagaagtggccaaactattaatgtccaatgaatgattggtgtgtgcagtgtaaatggactttctttggggaagagttggttgaccaaggcgaaaccaagaatcccagttgcggttgtgagaatgtataatagaacttgattgaagtgtgatttgaaatgatcgcgcaaggaggttgtctcaatcgcctcaccaacaccggctagcggtgcgtggaagatggccgctagcatggcaccaatccccatcgtcaaaaacgtttctttagtttaagtcgatcgcccaaccaagtgattaggccgccgacgttggtcgagagcgcggcttcagggccaaggctagcgccgcaggctaatacaactaaggcggcgataatgtttttaccgacttgctgttggtaggcaacggacccggtttgtttaaattcgctgagtgtttcatgcattgttttaggataaggcccccaataacgttgcattaagccgacgagtaatccgccaaatagaccaacaagcaacggataaaatggctggttgaaatgcgaataaccgacttgccaaattaagtgtgtactgaaattaatgagggctaaaaaggcggccgctatgccaccaatcaacaatcctaaaagtaagctatataaaacaaaaataattttaaactgcgtggttttagtggtaggtgatgacatagagcctcctagttaagggaattatttatgaactattatgcactacccacgctagtttgaccatagtcgaattgtgagggaaagaataatgaaaatcgatcgattacaagcatttagcgatggcgtttttgccattttattaacactattagtgttagactttaaagtgccggactatcaagcagggcatttgagtcaagcggtgattgcacagtggccaactttggctgcctatgtactatcctttttttatgtggggacattatggttgtttcatcacgattattttgcgaaaataaaacaaactaactggcagttaaacgtgatcaatctcagtattttatttgcagtgacactgattaattacccaactagtttgttgtcggaatcgattgctcaacaaaatggcgctgatattcgatttgcttttacatcgtatgcgattgttgcattagtcatctcagctttgttttgggtattatatcggtatatggcactgcatcatgaactaatgcgtcagtatgaacagcgacacgaggaattttatcaaacgattaaaaatgatcccttacgaagtgtcttgatttacgccattgccattgtcggaattcagattaatagctggctaggggcactgttgattttgctgggcaatatctttcatttcatcgcatacttgcgacttagtcggagtgtcacgctgtatcatttgaatggaaaggatgaataacatggcaaaacaaaaaacaaattggcggtgggtagattggctttatgtcttcaccattgtgagtcaattaatctatattggttattacttagaacaaatgctgactaaccccaaagacaacggaacattgtcttttgccgttttacaagtggttgcaggcctggtgattgcgaccttacctattatcattgaacgctttatgccataccggtttccagagattctatatgcagtttatttaatctttgtatactgttcgattttattggggacgggattacatttttatagtcgcttatactactgggataaattcttgcatgtcttgagtgccgggttattggcgggcttagggtatacggtctttaacgtattgatttcaaaacaactccgtcaaaccatttcagccttactcatgagtttgtttgcggcaacgtttgggagtacgattggtgtgttgtgggaattctatgaatttaccggcgatagtttgttaggcttaaacatgcaacgttatatggcaaaaggtcaccttttattaggccaagcagccttgttagacacgatgggggacttactagcggatgtcttgggatcatgtttaatcgccattatcggctatttctgtattaaacataaccgggactggttagataaactgatgtttaccaaaaaatagagtgcgtttgtggcgcttatattttgagcattaactggatttgacgaattggcgattgtaatcaccgatttggcaaattctgttaagcgcagaaatatgccacaaaaagcacgtttcaacaaaaaagtggtgtcgctctgaaaatgagcgacaccacttttttgtattatttttgtatttcatgttcttcgcgtaagacttttgtattctgacgcacccagaagaggttgacgattactaaaacggttgtcgataggaaaaccccgctgtaaccgaataggccagaaacgctggaaccaattaaaggtccggcgacattccccattgcttggaaggattggttataactgaaaatccgtccggcggaactatggggtgagtacttcgcaagaatcgtttgaacttgcggtaacaatgcggcatcggcgaccccaaccagcagacgcagggcaccgagttgccaaacattttgaacgaaagcttgcggaacgtaaacgaagacggcgaagatcaagccaccgagtaaaattttctcggaaccgatccgatcgccaagtgcaccaaaacgcggcgcggcaattaaggttgcgatccctggagtagccgcgacaactccgctgactaacgctacgttattgccatgatgcattaattgacggacatataaactcaacagcgggctaattgagttgttggaggcttgaataatcattgtggtgacgaacatgccgataattaaatgcgggtatttcaattcatgaatcagttgccgaccgggtacttgatcgcctttttctactggcgtgaagtcttcgtgaacgaaaaccagacagaggataaagacgatgaacaagatggtaccggtaatgaagaaggttgttcgatagccggttgcttgggcgataatcccacccaacaacgggcctaataaggttccggaaacacttccggtggtcagggtgcctaaagcttgaccacttttttcttgtggtgctgaagtggcaattaaggcgtttgaattactgatataacccgagaagaagccttgtaatagtcgcaaaccaattaattcataaatattttggactaagcccatcgcacccaggacaatcgctagtcctaatgaggcgcggagtaacattaatttgcgaccacggcggtcagcaattttgccccaccatggtgaaatcagagcggtaaccaagaaggtaatagaataggtcaccccactccataaactcagttgggccgttgtaaagttgccaagtgtgtcaatgtataacgacataaatggcataatcaaactaaaagcaaccccggccatgaaattaccaaaccataaaacgacgaggttctgttcccattgtgcgcggcgtctgaataaacgttgacgaatgttagtcaacatggtgtcatcatctcgattctaaaaagttaaagcggcgaccacgcttgctgatgtgcgtggtaggcgtcttttaagtgtgggagttgttcaaagagggcagtcagttgcgcatctttagctcgtggcagctggcgtttaaagtacaaccgctgagtgtcgtaggcagtcaatgcgcttgcttgttgggctggtgtaccgtgttcggcaaaatagagtagccaatcaaacagccattctttatcagcatcggattcataacgggctagcaaagtgtctagctgtgctccctgtgccactaacaagtaatggttacgctgcaaaggggttaactcattatctggatttagatcaattactttgggacctaattgttcgagaaaactatccagcgaatcagcaacggttaaccattgatcgacctcagtatctatgtagcgaatcggtggttcagctgaggcttgttggcaatcaaatacaaagtactgctgttgatgctgactaaaagggactaagtaatcgggcaagtcgggggcttggatgactgcttcaccgttgtgagcaatcccagctaaataatgacactcaacgtcggcgagaccatcacttgttggctcactcgtaggaaggctaaagttagtcaaaaaaccgccattggttgtttgacaaagtgcctgataactcatgggaatccgagggtcatcgacaatcatccgtggtgcagttaaatcaacattcgcaattgctggctgtgcagtaaacatgcaagtatccctcccaaaattggtaactctttaattttaccatttatgtcaaaccaaggttttgttaaggttggcaacctattctttatttgttgtagcgagtctgataatatgaagacaacattaaagaaaagaggatacgcgtatgttgtggtttattattatcattattttgttagtggttggcgcggttggcttctatatcagcacctacaataacatggtcaagagtcggaactggacagatgaagcatggagccaaatcgatgtacaactcaaacggcggaatgacttgattccaaacttagtatcgaccgtgaaaggttatgctaagcatgaacaagacacgttggaaaaagtcatcaagatgcggaatcaattggttgaaatgccagctgataatcggcaagcaacaatggcggcttctaatcaattaacggattcattgaaaagcgttttcgccttgtcagaaagctatccagatttaaaagcggacgcagaatttacgaagttaatggaagaattgacgaatacggaaaataaaattgcgtatgcacgtcaattgtttaactcaagtgctacccgttacaacaaccaaattcaaactttccctggtaatattttggcaggtgctcacaatttccaaaagacagcttacttagaaacgccagttgaggaaaaagcagcacctaaagtttcctttgaatagggtgtgattgggaatgttatttgaacaaattcaacagaacaaacgtaaaacggtatatgtgatgattggcttttttgctttagtattggcaattggggctgcattagggtatctgtttatgcgtaatttgattagtggtgtcgtggtggcggctattttagccgccgtttatatggcgatgatgattggaaactcaaccaacgttgttatgcagatgaatcatgcgaccgaagtccatgatgctagcgaatatcctgatttatggcacattgttgaagacatggcgatggtcgcccaagtaccgataccccgggttttcattgttgacgatcctagcccaaacgcgtttgcaacaggcaatgatccacaacacgctgcggtggcggtcacgactggcatcatggcgcgtttgaatcgggaggaactcgagggggtaattgctcacgaagtctcccatattcgcaattacgatattcggttacaaacgattgccttggcactttctgcggtgatttcaatgctcgtgaacatcggcagcaacatgttatggtggggcggcggccgcagtcgtgataacgaccgtgaagaaggtgcaagtaatatcatcggtttggttttttcgatcctattgttgatattgggacctttggcggctagtattgcacagatggcgttgtcgcgaaatcgggaatacttggctgatgcatctggtgtcgaattaacgcggaacccacaaggtttgatcaatgcgttattaaagatttctgacagtgagccaatgcaagctgcggatccatcaagcgcagctttgtatatctcagatccatttaaaggacttagtcggtcgggtactcatttatttgatagtcatccaccgattgaagaacgagtcgctaaattaagagcgatgtaatgttttaaagacataacgcatcagctgtaggtaatagttgatagaacacgttttatatagagggaggcaaaattcatttttgtccctctctttttttgtataataaaggaaaagaggagtgatcagtgtgcgattatccccaatccagcagttaatggcgttacaatctactctaataatgcaattgaatgagacaccgagcaaacagattaccatgattgatttaccggttgtgcgtgggcaattattattggcattgcatgcgcgtcaccagctaacattatcgacgcaacaacgcacaatgattcaacgcgccatcatcacaacgctggcaactaaaacggatggcactcaattaatggatctttggcggcaaacactaccgcagcggtatcggattgttgatcaggcagaggtggtggcccattttgaacagttagaacgcgctaattgggacgttgcgagtttacgcgcttatgcaacccatttaacgggacaacttgctgcgcaaccaacagcgcttaaaaggattttgcaacacaattggcaagcattacatcaagtaggctcagcactttatcaaatgctttttgaagcatacggggaccgaactgcacaaccagtaattaattaccagcggatcaatttagtgctcacgcatttaggggcgcagttggatgagcatgcgtttttgcaattaacagcacgtgattatcaacttgacccgcaattagcaccagatgcgccttttttagcaacctttgcgcaaagtgtgcaacgtgcatttgtcggtcgagttttaaccgataaacggattcatcaattcagaatgtatttagatcggcagaatctacgctatattcgccattattttcaacactctggtgaaacagatgaacaagccttagcgcggtttgtgcgaaaacgacaagcgacccagccacattattggctgcggcgtgaaccagctcggctccataataaataccgcaacggacagcgcccaacaacgcattggaatcgaaaacgactcacgccggattttcatagtgaatttattctagcaccatctggagcatttatcagtcaatggcaagtgcttaaagtaaaggcggatggtctgattgatagtaatcctgaccattaccagctagatgatggcacactccggcaactactaaacggtgaatcgtttaattatgctaatcggaatgatcggcaacacgcccggttagatagccaaccaccgctgcaaaatgatcatgcactacgcaaaacagcttttaaagggtggcggagtccgactaagcaacaatatcgaccaaatgataaacaggttgatgactattcacggtggtactcttaattggtggtcaatcatttttggggcttttttgaaactatggtacaatattgcgtagtattttaagccataactaaaaaaagcgtgcgtaaaaatgcacacagagtaataggagttattgagatatgaaaatgcagttgggtgaaattgcacgagtcactggggctaaaaacgatattgaacaatgggcaaccattgaagtgacgaatgttgcgtttgacgcacgtcaattaaatgcgggcgctttgtttgtaccgttagctggtatgcgtgatggtcacgactttgttggacaagctaaggaaaatggggcagtggcaactttttgggctgccaatcatgatgcacagccaactgattttcctgtattagtggttacagacccactagcggcttatcagaagttagccatgcattatctccaaaaaattaatcccaaagtggttgcgattaccggtagtaatggtaaaacaacgacgaaagatatgacagctgctgttttaggtagtcagtacaatatgcacaagacacaagctaactttaataatgaaattggtgtgccacaaacgattttatcgatggaagctaatactgaaattttagtgattgagatggggatggatcgcccaggtcaattaaaagcgctcagtgaattagccatgccagatgtcgcagtcattacgatgatcggggaagcccatatcgaatttttcaagacgcgtgataagattgccgatgctaagatggaaatcacagatgggctcaaagaagatggtctattaatttacgctggcgacgaaccgctattgactgaacgggttggcgaactcacaaccgagacattcggtaatttgacgaccaatgacttatatcccttacaagtccgtgcaggtgaaactgaaacgtcattcaagttgaatgcttggccagagatgacgtttacgattccaatgatgggtgcttataatgtcaataatgcgttggccgcaattttggttgggcaacggttccatattaaaccagaattaatgaaaaaagccttggcgaattttgaagtcacaagtaatcggacagagtggcttgttggtcaaaagggtgaacggatgttgagtgatgtttacaattcaaacccaacggctgccaaagaagttttacacaatttcagccattttgagactgacgggcggcggattgccgtcttaggcgacatgttggaacttggtactgccagcaagaaattacacgaaagtttggcccaagaattagatcccacgatgattcaagaggtcttcttgttcggggatgaaattgaaccattatatgtgacgttaaaagagcgttatgcaccagaacgcctccattactttaaccgccatgaacaaacgcaattaattgctggcttgcaagcgcaggtacaacctgacgatttaatcgttttaaaggcaagtcatggcttacatttagaaaaagtagtcgctgctttacaagatactgaagttaattaatgattagcaattgacagacaactgcacaggcacgctgtttagcgattgaagctatggaattagattaacaattggagcaattccgtttgctaattaagttgtggcatgataagctattaaggagcttttttaatgaaaaaggcttttgaaaacaattatattacaagacagatttttgaaaatggtgcaattgacgaagtggacctgttttgtaatggcatgttttttacaaaacaaggaggaacactatttgaaattcgcagaattaggtttatcagaaccaattatgaaagccatcgaacgcgctggctttgaagaagcaacacccatccaaggcgaaacaatcccattggcattagctggtaaggatgttatcggtcaagcacaaactggtaccggtaagacagccgcttttggtttaccaatcttacaaaacttagacttagacaatcctaacattcaagcattgatcatttcaccaacgcgtgaattagcaatccaaacacaagaagaactttatcgcttaggtcgcgaccgtaaagcgaaagtgcaagttgtatacggtggggctgacattcgtcgccaaatccgctcattaaaagatcacccacaaattcttgttgggacacctggtcgtttattggatcatatcaaccgtcgcacagttaaattagaccacgtgaaaacattggtcttagatgaagctgacgaaatgttagacatgggcttcgttgatgatatcgaaagcatcatcaaacaagtgccagaccaacgtcaaacacttttattctcagcaacattaccagcaccaatcatgaaaatcggtaagagcttcatgactaaccctgaaatgatcaaagtgaagtcaaaagaattaacggctgacttaattgatcaatactatgtgcgggcaaaggacttcgaaaaattcgacattatgacgcgtttattcgatgttcaatcacctgaattaacattaatctttggtcggacaaaacggcgtgttgatgaattaacacgcggtttgaaggctcgtggttacaatgctgaagggattcacggtgatttatcacaacaaaaacggatgagcgtcttgaaatcatttaaggctggccgtttagatatcttagtggcaacagacgttgctgctcgtggtcttgatatctcaggtgtgacccatgtttataactacgatattcctcaagatcctgatagttatgttcaccggattggccggacaggtcgtgccggtaagtcaggcgtttcagttacttttgtaacaccaaacgaaatggaatacttacacatcatcgaaaacttaacgaagaaacggatgttaccattacaaccacctacagaaaaagaagccttcaagggccaattagctgcagcggttgcagacatcaactcaatgattgaaaaaggccaattggctaaattcagcgaagaagctgaagaattattgaaacaattctctgacgttgaattagcttcagtgcttttgaagacaatcagcaaggaatcagttcctgttaagataacaccagaacgtccattgccttcacgtaaaaaaggtggcaatcgtagcggcaaccggaatggcggcggcaatcgtcgtggcggtaacggtggcggctatcgcggtggcaatcgtcgtggtaatggcgatggcaaacgtcgtggtaatgacaacaaagacggtcgtcgcaacagtggcaacggcgatagcagcaaacgtcgtagcaatgacaatcgtgacaaccgtaagaagactgatggccgttcaaaacggaacttcacaattcgtacaaacgataaataagactttttaaaaacagcgggcggccaacttggtcggccgctgttttcatatagtcaattgtgacagagatgtaagttcagtctctgtcttttttgtggtaaactaattaaaaatagggtactaggggcgaagacgatgattgctggattaggcattgatttagccgaaattgatcgatttgaaaaagcacagagtaagaatagtcattttgctgaaaaagtattaacagctaaggaatatgaactgtttaaacggtatacggggcgccgtgcgttagaatttttagcggggcgctttgcagtgaaggaagcttttagtaaagcttatgggactggtattggacaggtacaactgcaagcgattgaaacgttaaatgatgcaaagggcaaaccctacatcaaacaagatttatttgagggaactgtccacgtatcactttcgcatacaacgacgttagtgatggcagaagttattttggaaagaggttgagacgatgacagtcggctacttacgaccaacacgcattctagttgatcaaaacgcaatttatgaaaatattcaaaatgaactaaaggatttaaaaggcacagatgcagtgattttccctgtcttaaaagcaaatgcttatgggcatggcatgattcctgttgcagaagcggcccaagcggctggtgctgcaggattttgtgtggctattttagatgaggccttagctttacggcgtgctaactttacggaacccattttggtgctagggattacacagcccaccgaaatcgaattggtgattgccaaccaaatctccattacggtcggctcactcgaatggttgcaagctgcttacgaaattgcccaacaaataccttatccacaaccaatgcacattcatttgagtgtggatagtggtatggggcgaattggttttagaaatgcgactgaattactagcagcagccacatttatcaaagcacatgcgaaatattttgatttagaagggatttttacccatttcgcaactgcggatgatcccgatgatacttattttaaagaacaaagtgcccggtttaatgaactagtagccgtgttaccagaatgtccacgatttgtgcatgtttcgaattcagccacgagtttatggcactcagcttgcaatgagaatttaattcgaatgggaattagtatgtacggattgaatccttcagggaatgcgattcctgaattgccttatgcattgaaaccggcgctaagtcttgaatcagaattggtctttgttaagcaagttgaagccggaagtaagattggttacggtgcgacttatgaagcgagtgaatctgaatggattgggacgattccaatcggttacgccgatggttggtctagacggatgcaaggctcaaccgttttggtggatggacatcggtgtgaaattgtcggtcgggtctgcatggatcaattgatgattcggttacctaagcaatatccagtggggaccaaagtagtttttgttggtaaaagtggtgatgacgaaattactttacaagagatcgcagattatgcagggacgattcactatgaaattatctgtggtttatctgatcggttaccacgggtttacagtggaattgatgaacattaaggattaagaatttgattatcgccagttctgtggtaggatgaataaaggttaaagtgttgattcggaggttgatgtagatgaaagctaaccgtgaacaactatccgttaaattagacgttgagttggtccaagcaattaagcagtattgtgaggtgtatgcccttgatgagagtgatttgattcaagatgcgcttcacgaattcatggcgaccagacagtcaaaagtagataacgtcattaacgggtacgctgagatggctagcatcaacagtcaaattgcggctgaatttaacgcttgcgaaagtgaggcgtacgcacacattcgcgtagttgattgatcctaattggagggagaacaagtgggagaattaatacagcgtggcgatattttttatgcggatttatcaccagtggtcggttcagaacaagggggcatgcgtcctgttttaatcattcaaaatgatgtgggtaatcaccatagtccaaccgtaatcgttgccgcgattacagcaaagattcaaaaaccgaaattaccaacacacgttgggattacggccaaggataatggtgtcgaacgcgactccgtgattttattagaacaggtacgaacgattgataaacaacgcttgaaagatcgcgtcacacatttagtggcggataagatggcacaagtcgatcgggcgctcaccattagtgttggacttaaagcggtcttaaatccttaatacataaataccaaaaagaaagaatgaagagaacccgcttataaaagcgggttctcttttttttgacctttatcaacagccggtaaatatgatatgatggtagctgttcgaaaaaacgtggttcgtaaccatcccacgcaaaaaaactaggaggattcaaagatgacgaatcaaagtcgattaaaaacggtgattctaaacgggttagtggcagcattatacgttgttttatcgttattcccaggtatgttgggatttgcttcaggagccattcaatttagaatttcggaaggcttaaaccatttagtggtcttcaataagaaatatctatggggtgttttcggtggggtattagtgttcaatttctttttcagttctgaaaacaagttactcgatacgctttttggtggcgggcaaactttattggcgctgcttgtattaacgcttgtgatgccctatttaaaacaaacttggcaaaaaatggtggtcaatattctcttgttcaccgtttcgatgtgtatgattgcgtggatgattgtgttaaccggttctactgctagcacacacattccattctggccaacgtatatttcgttggcactttcagaagcagtcatcatggtgattaccgcaccagtaatgtatgctgtggataaagttgtgcactttgatgcacaaatgaaatcataaagattaaaaagggcagtcctaattaggactgcccttttttgcattaaactaaatcatcaagtttggagtcatcacggagcgccttatcagattgtaaatcatcgatttcaggaacacgatagccttttttctcgagcttataaacaatctttttcaaaatctcaagatcaagtccagcaggcaaggtgaaaagggtgcgtcgtacgaattcatcttgcttagcatctaaggtgatgcagctggcgattgaggtatatttagcgataatcttcgacatggcaaccaaatcaccttgttcaccagaagaaagcacagtgagtacatagctacttaattcgagattccacgcttcagaaagcatatttaataacgtgctatgcgtgagaattccgtaaaaattgctatcttcgtctaatacggcgatgtatggcaaatctttaatgttgaagaatactttgaaaaacggtgcgtcaactggaatatacttggtcatattcttcaataaactggtcacgggaagctgcatatcgcccccttgagacttatgacggtagatgtgcatcttatagatgttaccgcggaaaatcttgccgctagcatctaggacgggcacacaacggtaaccagactcttctagtagctgtaatgcttcttctaaggtcaccgattcaacaattgtggtgagacgttctttaggtaaaactagggatttaatgagcataggctttctccttagattaaaattctctcatatactaatgtaatcatatcataccaccaagcagattaaaataactagtttttcgactcagcgaaaacttgattagtaatcgatgagaaagaacgtgaaatctaagcaataaaaaagcagggataaaagttaattttatccctgctttttatttaatcgttgagcttactttttctaaacgaattctgtaggtcagctacctctggttaatccgtagaggagaggtgttgctagtacactacgtctaaatcactacaactggaatgccttcgctaacagtatcgtagagtttagccattgtgccaggtggggtattgatacagccgtgtgagccgtgttctttataccagtcaccaccgtacttaggttgccatggcgaatcatgaatcccaacgccagtttcattgattggcatccagtaattaactgggcttgcgtattcgctgaccccatcaaagttcttccccttcaatgtggcattgcgttctttcttccaaacgctccaaacaccggttggggtgacttgtggtggacgtgctgaaacgatatcagtgtcaattgtgaccttaccatcttgatagagccacatatgttgggcttttaaatcaatttcgatgtaggttgaaccgacactacgcgttttctgatcagttccggaaccacggataacagctgttcttgagaaatctttgcccttaggcacttctgtcattaaggcgttgatttcatcggcaggagagatactccacccataaatcccggctgggacagtgactgtgccttcttttgtagaattgaaggtcaaatctttgtcaaaagtatcatactttgcttttaattgataaacgtatttggtaagggcagctttatctagactaatggtaccgttgttatacgttaaccaactttggatgtcttctttaggaacttggaaatcattaccattaactgaatagctgattttttcattagcaatcgtcttcaattgatcggcagtttttttcaattgcttgtctgtagatttcacttcaggttgcgcataatcgttttttaagtcgattgttgcttgaccttggttaatgccgtgggcaactgcttttttgaacttagcggcatcaattgtgttcccgtagacttcttttacgagatcgaattgatgattctcgaggttaatatgggcattctctgaaggtttgcgattagcgttgaccttttcgagggtttccgttgagaatttgtcaaaatcagcggcatttaaaatgagtgcgtcttctgatttagttgtttgttcactggcaaaaacgtggcctagccaagaccaaccgttttggctttttttaatcttttccaataacggtttaaaattatggctaaagccagcttcttgaccgctaaaagttagcaatgtttgattgttatcctttagcgtatatttttgacgattcactttttttaagagttctgtgttagcgtctgcgactgatcggccactaatgttgacaccggcaacggtcgtatgtggcaagaatgctttttgataatgaagactgactgccgagtaacctccaacaaggataacggctgctacgccaagggcgacgtaggctttcttcgtaagtttcacaacctcaactccaatctctgcataggttaatcataccccagtatcacataaaatacaaaggcgttaactaatagttagcatacaagatatgcacccaaaaagaaataaaaaagtattatttttaataaaaaatatgtagttgataatattaacaccataaaaaaacgactctcattaaatgagagtcgtttgaccaacagcaaagagcttattggcgagtttcgatatctaattcagcaaatgcttttgtaacgatatcttttaattgttttgcagaactgtgcatgctttccatttcgtggtctgtcaatggaatttcaaggatgcttgtgatacctgagcggttaataacagcaggtgaaccgataaagatatcgttcaagccgtattggccttccatgtatacagataatggtaagacagcattttcgtcgtctaagatagccttagtaatacgagctaatgcagtaccgataccgtagaatgtagcaccttttaagttaatgattgtgtaagcagcgtcacgaacactttcgaagatcttaacaagttcttcttctttaatttctggatgagctttaacccattcagaaatcttgataccaccgatgttagcgtgtgaccatacagggaattctgtatcaccatgttcacccatgatataagcatggaccgaacgtgcgtcaacgttaaccatttcagcgatgtctttacggaaacgagctgagtcaagtgatgtacctgaaccgataacgcgttctttagggaaacctgataatttccatgtagcgtatgtcaagatatcaactgggttagcagcaactaagaagataccgttaaagccagattcaacgattgggtcaacgattgtcttcaagattttaaggtttttacttactaagtctaaacgtgtttcacctggtttttgtggtgcgccagctgtgataacaacaacgtcagcatcttttgcatctgagtattcagcagcatagattttcttaggagaagtgaaagctaatgcatcagataaatcgattgcatcaccttgtgttttttctttaaagatatctacgataccaacttcttgtgcaataccttgtaaagttaatgcataagcgtaactagaacctacagcgccgtcgccgacgaggataactttttggtgatctttttcaatgtttgccaatataatgacgtcctttctgtaaatcaattcttcatttcgaaaaccagtatagcataatttacaccaaagttcgcgatttttggttaaattttcagaaaactatttctttcacaaagagagaaataaactgaatatggtataatggttcttaatatcaactggcgactggggagaattaactgctcagaatttttgcgtgatagcgccagtcaaaaagaggacgttaataatgaaaatgattgttggcttgggaaacccaggcagtaagtatgcaaagacaaaacacaacattggttttatggtgattgatcaattatgcgaacggtttaatgtgaccttaaacaagcatgattttgaagctgaatacgggagctttaaatatgaaggggaaacgattttcttagtgaaaccactaacgtttatgaatgattccggtcgttcagtcgggcctttaatgaaatactaccaagttaacctagatgaattagtagttatccaagatgatatggacttaacgctaggcaagttgcgcttacggcaaaaaggttcagcgggaggccacaacggcattaagagtatcatcgcaagtgtccaaagctcagaatttaagcgtgtcaaagttgggattcaacatccacaaaaaagtacagtcgttaactgggtcttaacgccgtttgacaaagacagcgcaccaattatcaatcaagcactagaccaggcatgcgaagcactagaagactggtgccaaaacgacgacttcatgaaaacgatgaataagtttaattagagtgtcgttggcagttggtcagattctgagcatttgcctaacttggcgaattgacgctgcaagcggcgatttgaaaagtgtagcaaagcgcaggaatctactgccaatgacacgtttcaaaaacagagtgcgtttggttgcggttagcaacagagcattaataaaaatttcaaataatcgaggttttaggattatttgaaattttagattaagcggaagttgttgcaaccaaaaagtacgtttcaaaaaacagagcacgtttcttcgcgccattataataagaaagtaaaggaacttttacatggatttaatgacaatgctggggcagaccaaacaggtgcaatccgttttaaagaatcaacgaccagggattaaacaactacttacagggctttcgggatcagcgaaaaccctgtttttggcgacgatttataaacaacaacccttattgattattgagagtaatacgttccaagccaatcaagttgctgatgatttgagtaatttactcaatagtgatcagatttacactttcccagttgaagaagtgatggcggctgaaatggcagttagttcacctgagtccagagcggaacgtgtgcgaacgttgagttttttagcaacaggcaaaaaaggaattgtgattacatcggtcgcgggcatgcggcggttattacctacagcgcgtcagtggcaagatagtcaactcacaatcaataccgatagtgaagttgatccccaggcacttgctgcgcaacttggtgaaatgggttatttccgagataagttggttggtaaacctggtgagttcgcaatgcggggggatattattgacatttttccactggatgcggaaaatccggtccggattgaactctttgatactgaagtggattcactgcgttcttttgaagcagatacgcaacggagtattgagaatttagatagtgttcaaattatgccggcgactgacttattggccaacacagcacaattggaaatggctggtgaggcattacaagcagcttatgaggcggttgcggccaaaataacggataaaactgaacaaaaacaattggcgacaaactttgaaacaccgattgaacggttgttggccggtgaacgcgttgagaatttagcgttgtttgttgattatctgtatccagatcaatcaagtctgattgattactttaaaaagagtggcttagtgatttttgatgactatccgcgcattttagaaacgcagcggattttgactgaagaagcggccaactggcaaaccgatatgttggaaacccaccgcatgttgccagaccaacgactcatgatggatgcccaagcgctcatcaaaaaagatacacatgcgcatctctatctatcactgttccaaaagggaatggggaagttaaaactcgatgcactcaacaatttacccacgcggacggtgcaacaattctttagccaaatgccgcttttgaaaaccgagattgcgcattggcaaaagcaaaaacaaacggtcattgtgctcgtgtctgatcctaaacgggtcaagaagattgatcagacgttccacgactttgaaattgatgccgtcatcgccaataagactcagttggagacggggcggacacaaatcattcaagggtcacttcaaaatggctttgaattaccggatttaaaactggtggtcttaactgaaaaggaactgttcaatacggcgccgaagaaaaaagtccggcggcaaaccttggccaatgcagaacggttaaagagttataacgaattaaaaccaggtgattacgtggtccacgtcaatcatgggattggcgaatacgtcggcatggaaaccttggaagtcgatggggttcatcaagactacatcaccatcttgtatcgggataatgggaagttatttatcccagtcactcaactcaatatggtgcaaaaatacgtctctgccgaggccaaaacaccgaagattaataagcttggcggtggcgagtggcaaaagactaagagtaaagtttcggcaaagattgaagatatcgccgatgatttaatcgaactttatgcgcaacgggaggctgaaaagggatttgcctttccaaaagatgatcaattacaggctgaatttgaaggccagttcccctatcctgaaacagatgatcaattacgcagtaccgctgaaatcaagcatgatatggaacgcgtccgtccaatggatcgattattagtcggcgacgttggctttgggaaaacggaagtcgctttgcgggcggcttttaaggctgttgaagccggtaaacaggtggcctttttagtgccaacaacgattctggcgcaacaacattatgaaaacatgctgacacgcttcgcggattttgcggtcgaaattggtttactgtcacggtttaaaacgcgcaaagaagtgacggcaacgctcaaaggcttagcagagggcaaagtcgacatcgtgattggcacccaccgcttgttatcgcaagacatcaagtttaaagatcttggcttgttgattgtcgatgaagagcaacgctttggtgtaaaacacaaagaacgacttaagcagttgaaggcacaagttgacgtgttaacgttgacggcaacgccgattccacggacgttacacatgtcgatgctcggtgtgcgtgatttatctgtgattgaaacgccaccgactaaccgctatcctatccaaacgtatgtcatggaacaaaatgccggtgcgatgcgtgaagcgattgaacgggaattagaacggaatggtcaagtgttttacctccataatcgagtgagtgacattgaacgcacggtcgatgagattcaagcgctggttcctgaagcaacggttgggttcgcacatggtcagatgaccgaggcacaactagaaggtgtcatctacgactttgtccaaggtaaatacgacgtcttggtgacaaccacgattattgaaaccggggttgacatgcctaacgtcaatacgatgattgttgaagatgctgatcattacggtctttcacagctctatcaattacgcggccggattggacgtagtagccggattgcttacggttactttatgtataaacccgataaggttttaacggaagttagtgagaaacgacttcaggccatcaaggactttaccgaattagggtccgggtttaaaattgcgatgcgtgatttatcgattcggggagctggtaatttattaggtaagcaacaacatggttttatcgattctgttgggtttgacctatactcgcaaatgttgggtgaggccgtcgctaagaaacaagggaagcaagtcgttgctaaaacgaatgccgaaattgatcttaaactggaagcttacttaccagacgcgtatattaatgatcaacgccaaaaaattgaaatttataaacggattcgccagatggattcagaagcggcctttgatgaaattcaggccgatttaattgaccggttcggtgattatccagatcaagtcgctaatttattagcgattggtcagttgaagatgaatgcagatgacgcgttaatcgaaaccatcaaacaaacgaaagaaatcattcaagtcaccttatcggcgaagggcagtcgccttgtttcaggtgaacaaatttttgaagcgttatcgacaacccgcttgaaagcaacggtcgggtttgaacaagaacaattaagcgtgaaactcgtcatccagccgaagatgcaaccggcagattggttgagtgaagtggcaacttttgttacaagtctcttgaagatagaacaaaagcacacggaacaaccaacggattaggcacgctaagtggaggccaggcatgcaaaataaacagatgcaacatctgatgaaaggcgcggtcattttatcaattgcgtcgtttatcgcgaaggtattaagtgccgtttatcggattccatttcaaaatatggtcggtaacaccggcttttacgtgtatcaacaagtctatccaatctatggcattggcatgacgtttgcacttagtggctttccagtttatatttcgaaactggttgctgaacaagtcaatccggaggaacaaacgcagctgttaagacgctcatttgcactgttaggcatctttggtgctgcaatcttcatttatttacagtatcaagcgccgaaaattgcgggggcgatggcggatccagcattaacaccgctgattgaaatggtatcgtttatgtttttattgatgccgtttctagcggtgacgcgggggtacttccaaggaattttcaatatggtaccgacggcggtttcacaagttgctgagcaactcgtgcgggtcgtggtcatcttggcggcagcgtggctatctttgaaactgcactggtcagtgtatgaaatgggcacatgggcgatatcaggcgccttctttggcggcttggttgcaacctatattttattacggccagcagaaaccgcctttcaactcaaggcgccacaccgtggtggcatcgattttaaggcgtatcaacaattggcaaaacgcttagcgattgaaggcgggtcaatttgcctctttgcttcattaattgtgttattacagctggttgattccttcacagttaaaaaagggttggtcctcagtggattatcggaagaacttgctaagaatatgaaggggatttttgaccgtgggcaaccacttgtccagctgggattagtcgtgtcacttgccttctcatcaacgttgattccgagtctgtcacaagcgcggcaacggcggcaacaatatcaatttcaacaagttgctgaagcgctgattcatatcagtttaggtttatcggcagcagcaaccaccggcctaatggttttgatgccgcagattaattatttcttattcggggatgctgatggtaatcaggcattggtttggtatatgttgagtatcgcaatcatcgcgctgatcaatgcttgcaactcggtgctccaaagtcttgatcagttccataaaacaacggcagccttaattgttgggttaatcgttaaagtagcaatcaatcaatggcttgtgcaacactatcaaattgttggcgcgagtgtcgggactgttatcagcctcggtgttgtgttagccttaattttacggcaatcaccagtgattgtacggcaagcgcttggtttgcaacgctttaccggtaagttacttgcgatttgtgcagtgatgtggctgggtgttaagattgcgctacagtttgcaccacaatcacttagttccagaggacatgcgattttagggacgggccttggcgtactcgttggtgtgctcctatttggcggattagcattacggtggcaattattctcgattcgagaatggctgacgatgccaggtggccggcaactattgcgcctttcgaaaaaaataaaaggtaggacaaaataatgcgcttagataaatttttgaaagtatcacgaatcattaaacgacgttcagttgcgaaagaaattgcagacaagggtcgaatcatgattaatgatcgccctgcaaaatcttcaagcaatgtcatcgtgggtgataaactggagatcggatttggtaataaaacgatggtcgtacgcattacacagatcatcgaaactacgaagaaaagcgatgcagctgaaatgtatgaaattttggaaacaagacaagctgaaaactttgattaaggaaaaagcgctggccgaattaatatgggccggtgcttttttttgtgactttgttgagcatcttaataaaagtcattaagaatctgggatcttagttgacgacctttttgtgaaattgctataatgaacttaattccgagatggggggcttctaagtgagtcgaaaaattgcgaaaatcgagaatgcatttacccagcaacaagcagcccagaaaatcgtgcaagacaaggcagcccatgttaagcgtgttcataaacgccgcttatgtggcttggggattgttgcagtattagtcgtcttaatttgtggtgtgcagattttccaaacccatcattcattggccgagattagagaaacaacggcagctaaagaaaagacattaaaaaaagctaaagcaactgaatctgatttaaagattcaagtgcaacagctgcatgataatgattacttggccaaatacattcggtacaagtattactattctaaagacggtgaaaccatcttcagtttgccccaagacaaggcgcctaatttaaattagcaacaaaaataattcagaatacgaccttgtttcaagggcaaagcgtgctatacttattttattaaatatcacgcttaagtgattaaaagtttgacgagttcaaacgaccatttaggaggacgtagttttatatggcagttgaagttggttcaaaagttgctggtaaagtaacgggcattacgaattttggtgcttttgtagatttaggtgaaggcaaaaccgggttggtacatattagtgaagtgtccgatagttatatcaaagatattcatgatgttttaaccgttggtgatgaagtcacggtgaaggttatgtcagatcaaaacggtaagattggtttatcaatccgcaaagccgttgatcaacctaaagtgcaagaacatccgcgccctcaaagtcgtccaaataataatcgcggtggatatcgcaaaccagagcattcaagcgcacctaaaaaagaaggctttgatgatttattatcagggttcttaaaagatagtgaagatcgcttatcaacgattaaacggaatacagaaggtaaacgtggtggccgtggcggccgtcgcagttaatagaacaaattgataaaggttggcttgaaagtttagtgatagactttcggggcaacctttatttcatttcaagtctgtgttggagaggaatcggtatgttagaacaagcatttcaaacacatcttcaaaaagagcagttctggcaagccggcgacaaggttgtggtggcaacgtcaacgggagtcgattcaatggttttattgtggttattgactcatctgccccaaaaacaacgaccccaagtcgttgtggctcacgttaatcatgaattgcgtgcgcaaagtacggctgaagaaaaatatttaacccagttttgccgattgcatgccatcccgttacgcattcaacattggccaaaagcgagtcatcctgaaacaggggttgaagcggcggcacgtcaatttcgctatgctttttttgatcaagtcatgcgaaccgaatcggcgcattacttggtgaccgcgcatcacggcgacgatcaactagaaaccttgctcatgaaattagttcgtagcggtgaattgcatgaaatgcgggggattcggcaagtcagaccgtttaaaacggggacgttaattcgcccgctattaccttttagtaagcaacaactgcgtgattacgctgatcagattggtttgaggtattacgaagatcaaaccaatcaggaacaaactgttcttcgtaatcggatgcgacatgcggtggtgccacttttaaaacgagaaaatccacacttgattcaaaatgccaatcggttcagtcaaagtctgacccaaatggtggcacaccaagatgatctaaccgcggcgttactgccattgttggcaatcaaaaaacagccggcggcaattgaagggcgtttagaccaactcgatggcttgaaccagacacaacaaagggcgctctggcaattggtgtggcaacgatatttcaagactttaccggcgttaaaggcagcccagttaatgcaagtgcaacaattgttggcgaacccgcagaaaccgcaaggccaagtggcattgaacaatggcatcatttttgaaaagcagtatcggtgttttcggattggtgtccaccaaatagtggattctttggtcaaaacacgaacattagcgattaatgaatggctgcggttaaaaaatggcgaacaagttggtgttttcgatatcgaccatctacctaatcaagttcaacggcaacaggtcgtttggttagcaccagaggaatggccactgcaactcagggcgctacaagcaacagatcgaataatgcttgataaggcacaccacaaaaccattcaacggttatggattgatactaaaaccccacaggcaaagcgccaaaatgcatgggcggtttggaccccaaatcaattgcttggccggccggatttacggatttcggcgttgtttaatcgcgaacaaactggtaaaatacggtacatactatgttatttagatgattaagcaaattacggaggctggcacaatgttagaaaaagatattgaacgcgtattatattcaagagaagacattcaaaaggttaatcagcgcttaggaaaacaaattacagcggattatcaaggtaaaaacccgttattaattggtattttaaagggtgcgatcgtcttcatgacagatttgattcgcgaaattgacctccatgttgaaatcgactttatggatgtgtcaagttatggtgctgagaccatctcgtcaggtgaagttaaaatcatcaaagatttagatacgagtgttaaaggccgcgacattatcattatcgaagatattgtagatactgggcgcacgttgaattacttaatggcaattcttaaaacacgtcaagcaaactcaattaaagtctgcacgttaatggacaaaccaagccgtcgaattgtgccagttcattcggattatgttgggatggaagtcccaaatgaattcgttgtggggtacggattggactatgccgaacgatacagaaatatgggaacaattggcgttttgaaacctgaaatttattcgggtaaataaatggtcaataaaagtcagatatgttatagtttaacagtatcaaaaggtcactgtgtcacaaatgatgagaagcttcaggaggtcacgtatgaacaacaaaaagaatggactgtttagtaatagtctgttttacattattatcttagtggctttagtcggtgtgttctcgttcttcatgaacggtaacgctggatcagagtctaaggaagttcaatcaagtacatttttaagtgaattgaagaccaataaggtcaagtcattctcaattcaaccaacgaatggtatttataaaatttctggagaatatcgtaaagcacaaaaaacagaacagcctaaaaagaatcttttaggacaaaaaacaaaagcaagatcagttaaacacttcacaacaaccttattacaaagtgattcacaagttggggcaatgaccaagttagctgacaaatcagcaaccaaggttgaaacccttcaagaaccacaatctggttggtgggtaagtattttaagtcttgtattgccattgatcatcatgtttggtttattctacatgatgatgggccaagcgggtcaaggtggcggtcaaggcggtcggatgatgaactttggtaagtccaaagctcaaaaagccgacaagaaagctaataaagtacgtttctctgatgtcgctggtgcggaagaagaaaaacaagaattagtcgaagttgttgaattcttaaaagatccacggaagtttgctgcattaggggctagaattccagcgggtgttcttttagaaggacctccaggtactggtaaaaccttattagctaaagccgttgccggagaagcaggtgtgccattcttctcaatctctggttctgacttcgttgaaatgtttgtcggtgtcggtgcaagccgtgtccgtgatttattcgaacaagccaaaaaagcagccccatcaattatctttattgatgaaattgatgctgttggtcgccaacgtggtgccggcatgggcggtgggcacgatgaacgtgaacaaacattgaaccaaatgttagttgaaatggatgggtttacggggaacgaaggcgtcatcgtcatcgctgctactaaccgttcagatgtcttagatccagcgcttttacgtccaggtcgttttgaccggaagatcctagttggtcgtccagatgttaagggccgtgaagccatcttgaaagtccatgctaagaacaaacctttagccgatgatgttgatttgaaagaaattgcgcaacaaaccccagggttcgttggtgctgatcttgaaaacttattgaacgaagctgctctagtagccgctcgtcgtagcaagaccgatatcgatgcttctgatgttgatgaagctgaagatcgtgtgattgcgggtcctgctaagcgggatcgcgtgattaatcctaaagaacgtgaaaccgtggcttaccacgaagctggtcatgcgatcattggtttagttcttagtgattctcgtgttgttcggaaggtaacaattgtccctcgtggccgtgctggcggatatgccatcatgttaccgaagaatgatcagttcttaatgagtaagaaagaattaacagaacaaattgttgggttacttggtggtcggacagctgaagaaattattttcaactctcaatcaactggtgcttctaacgatttcgaacaagcaacggatattgcccgcgggatggttactcaatatgggatgactgataagctcgggacagtggcccttgaaaaagaaggtcaaccattcgttggggcagcttacggtcaaggcccagccttctccgaaacaactgcggctgcaattgatagtgaaattcgtcggattattgacgaagcacatcaacaagcacacgaaattattgaagcgcaccgtgaacaacataagttaattgcggaaatgctcttgaagtacgaaacattaaacgaaaaagaaatcttgagcttgttcaatgatggtaagatgccagaaaagaacgctgaagaattcccaagcgaaaaagcagctacttttgaagaagctaagaaggcgcttgaagcaaaagaagccgcaaaagaagattcagaaaaagaaactgataaaaaggatgtgacaatcacacctgatgaagatgatcaatcgacaccagctgaggataatcaacatccagacgatgaagcataaattgttacaccaaaaaggtcgacacgattagtggtcgacctttttgcatcaatccataaaagaggttatttagatgacagattatttaattaaacaaatttcagaagatggccaacttcgtgcttatgcagtgaacgcaactgatgttgtaacggatgcgcaagaaaaacatgacacatggtcaacttcatcagcagcgtttgggcggacgattgtcggcacccttttattgagtgccgctggcttaaaaggtgatacgaagatgacagtcagagttgaaggtgacggcccagtcgggaagattgttgtcgatgggaatgcgcaaggcacagttaaagggtatgtgacgaatccacacgttaacctaccattgaacgacaaaaataaaattgacgttaaaggtggcgttgggacaactggtacgttgagtgtcacgaaagatcttggcttaaaagaaccgtttaccggtcaagtaccattggtatcaggagaattaggtgaagactttacttactaccttgctaaatcagaacaaacaccatctgcagttggcgtttcagtcttcgttaatgaagataactcaattggtgtcgctgggggcttcatgattcaaattctcccaggggcggatgaccggttaatcgatatcttagaagcgcggctgaaagaaatgccgctggtgtctgaattactccaacaagggatgagcccagaggaaattatcactgaaattgtgggcgaactcccaatgaagacgttagaaaaaatacctgttaaatacgaatgtgattgttcaaaggatcggtttgcaaaggcactcagttctgttgcgccagcggatttacaacaattaatcgatgaagaccacggtgctgaagcggtttgtcgtttctgtggcaagcaatatcaatttacagaagcagaactaaaggcaattttagccgcgcaatagaatagtcgcaaatttttgcctgaatactatttttttgctatgataatttggatattgtcggaagacacgaagggaatgggttggcattatgacatggcaaataggagacgtgacgattccaaatcaagtagtcgtcgcaccaatggctggtattacaaacgcagcatttcgcgtaactgcaaaggaatttggcgcaggtttagtggtctgtgaaatgatcagtgatcgcggaattatgcacaataatcaaaagacaatggggatgatgtttgttgatccgaacgaacatccagttagcatccaaatttttggtggttcaaaagacaccttagtggaagccgctaaatttgtggatcaacatacacaagctgatattattgatatcaatatgggttgtccagtgaataaagttgttaagacagatgctggcgcgcgttggttattagatccaaacaaagtttatgaaatggtctcatacgtgacagatgccgtgaagaagccagtaacggttaagatgcggacaggctgggatgaagatcatattttcgctgttgaaaatgcacttgctgccgaacgtgctggtgcttcagcacttgcaatgcacggtcggacacggaaacaaatgtacaccgggcaagcagactgggacattttaaaacaggttaaatctgaattaacgattccatttatgggtaacggtgatgtccggacaccacaagatgctaaacgtatgctagacgaagtgggtgctgatgctgtcatgattggccgggctgcgctcggtaatccatggattttaagccaagtggaaacctacttacgaacaggtgaattgattgctgaaccaaccccatgggaaaaaattgcaacggccaagttacaattacaccgtttagtcgaacttaaaggtgaaaatgtggcttgtcgtgaattcagacaacaagctgcctattacttgaaagggattcctcgtgcggctaagaccaaagcggcggttaacgaagtggaaacggaacaagccgttggcgatattttagaccgctttgtagaagaaaccgaagcgagaatggcaaattaggttccttatgttggtgttttcgtgttaaaatcaacattagtagataattgaatgtatggaggaattgtcagttgggacaaaaagataatcaaagagaaatgaacgaccaactaaaggtccggcgtgaaaagttacaattgttaaaagacgaaggaattgatccttttggtagtcgttttgatagaacacatatggctgcggaattacacagtgaattcgaagcaattgaaaaagacgatttagatgctaagaatctagaagtcacaattgcaggacggatgatgtctaaacgggggaaagggaaagttggctttgctgacatccgtgaccgttcaggtaaaatccaaatttacgtgcgtaaagatgaagttggcgaagaaaactatttaattttcaaaaaggctgacttaggtgatcatttagggattactgggcaaattatgaagactgacatgggtgagttaactgttaaagcaacgcacctgactttcctatcaaaagcattacgaccattgccagataagttccatggtttaaccaacgtggaacaaatctatcgtcaacgttacttagatttaatcgcaaatccagagagcttggatcggttcacgaaacgcagcaagattatttctgctgtccgtgaatatttagataacaatggctttactgaagttgaaacacctgtcttgcatggtcaagctggtggtgcatcagcacgaccatttattacccatcacaatgcgctagacatcaacttgtacttgcggattgcgcttgaacttcatttgaaacgattaatcgttggtgggatggaacgtgtctatgaaattggccgcgtattccggaatgaagggattgatacgaaacacaatcctgaatttacaatgctagaaacatatgctgcatactttgattataaagacgttatggatgaaacagaagggatcatccgatttgcagcgcacaaggttttaggaactggtcagatttcatatcaaggacaagcgattgatcttgatggtgattttggacgggttcacatggtcgatgcaattaaggaaaagacgggtgtcgatttctggcaaccaatgacggttgaagcagcgcgtgaattagctgatcaacaccacgtgaagtatgaatcatactggcaagtggggcacatcattaatgcgttctttgaagaattcgtggaagatacattggtacaaccaaccttcatctatggtcatccagttgaaatctcaccattggctaagaagaatgctgaagatgatcgttttacagaccgttgggaattatttatgtacggtaacgaatatgcaaatgcctttactgaattaaacgaccctatcgatcaacgtgaacgttttgaagcacaagctaaagaacgtgaaaatgggaacgatgaagccgaaggaatcgatgaagattacatcgaagcattggaatacggaatgccaccgactggcggacttggaattgggattgatcgactagtcatgttactgacagatgccgcatcaattcgggatgtcttattattcccaacaatgcgtccagacaacaataataacgattaagattaaactaaagcccgcaagcagacgatttgcttgcgggctttttttattgaaaaaaattgggattataaaaagtttttttagtgtattttgtgggtgaataagcatcaactttcggtatattatgttgtttgcgcgagttgtttgtttaatagttcatttatttgcataaattgcggatactatcgactgtttagattatgaaagttcataaataacagttgagattaatagttgacgaaaggctgtagagctgatatagtagtctatgttgtcagcgagataaaacattgttgctaacgagtcagataattaaatcagtttgaatatttattcaaaaaacatttaaaaacgcttgacagtgttcgttagaaatgatatattaatt
